(19) United States
(12) Patent Application Publication
(10) Pub. No.: US 2024/0279663 A1
(43) Pub. Date: Aug. 22, 2024

(54) TREATMENT OF ANGPTL4 RELATED DISEASES

(71) Applicant: Empirico Inc., San Diego, CA (US)

(72) Inventors: Omri GOTTESMAN, San Diego, CA (US); Shannon BRUSE, San Diego, CA (US); Brian CAJES, San Diego, CA (US); David LEWIS, Madison, WI (US); David ROZEMA, Cross Plains, WI (US)

(21) Appl. No.: 18/567,011

(22) PCT Filed: Jun. 6, 2022
(86) PCT No.: PCT/US2022/032358

§ 371 Date: Dec. 4, 2023

Related U.S. Application Data
(60) Provisional application No. 63/197,921, filed on Jun. 7, 2021.

(51) Int. Cl. C12N 15/113; A61P 1/16

(52) U.S. Cl. CPC C12N 15/1136; A61P 1/16; C12N 2310/14; C12N 2310/315; C12N 2310/322; C12N 2310/343; C12N 2310/351; C12N 2320/32

(57) ABSTRACT

Provided are compositions comprising an oligonucleotide that targets Angiopoietin-like 4 (ANGPTL4). The oligonucleotide may include a small interfering RNA (siRNA) or an antisense oligonucleotide (ASO). Oligonucleotide modification patterns are included that may be used to improve their stability or efficacy. Also provided herein are methods of treating a cardiometabolic disorder by providing an oligonucleotide that targets ANGPTL4 to a subject in need thereof. Some embodiments include treating a subject with hepatic steatosis or another cardiometabolic disorder.

### CROSS-REFERENCE

[0001] This application claims the benefit of U.S. Provisional Application No. U.S. 63/197,921, filed Jun. 7, 2021. The entire content of the priority application is expressly incorporated herein by reference.

### BACKGROUND

[0002] Cardiometabolic disorders are becoming increasingly abundant, and may affect a large proportion of the population. Improved therapeutics are needed for treating these disorders.

### SUMMARY

[0003] Disclosed herein, in some embodiments, are compositions comprising an oligonucleotide that targets ANGPTL4. Disclosed herein, in some embodiments, are compositions comprising an oligonucleotide that targets ANGPTL4 and when administered to a subject in an effective amount decreases circulating triglycerides, decreases circulating glucose, decreases a liver steatosis measurement, increases circulating high-density lipoproteins (HDL), or increases insulin sensitivity. Disclosed herein, in some embodiments, are compositions comprising an oligonucleotide that targets ANGPTL4 and comprises a small interfering RNA (siRNA) comprising a sense strand and an antisense strand. In some embodiments, the sense strand comprises modification pattern 8S. In some embodiments, the sense strand comprises modification pattern 7S, 8S, 9S, 10S, 11S, 12S, 13S, 14S, 15S, or 16S. In some embodiments, the sense strand comprises modification pattern 7S, 8S, or 9S. In some embodiments, the antisense strand comprises modification pattern 10AS, 11AS, 12AS, 13AS, 14AS, or 15AS. In some embodiments, the antisense strand comprises modification pattern 10AS or 11AS. Disclosed herein, in some embodiments, are compositions comprising an oligonucleotide that targets ANGPTL4 and when administered to a subject in an effective amount decreases circulating triglycerides, decreases circulating glucose, decreases a liver steatosis measurement, increases circulating high-density lipoproteins (HDL), or increases insulin sensitivity; wherein the oligonucleotide comprises a small interfering RNA (siRNA) comprising a sense strand and an antisense strand; and wherein the sense strand comprises modification pattern 7S, 8S, 9S, 10S, 11S, 12S, 13S, 14S, 15S, or 16S; or wherein or the antisense strand comprises modification pattern 10AS, 11AS, 12AS, 13AS, 14AS, or 15AS. Disclosed herein, in some embodiments, are compositions that target ANGPTL4. Disclosed herein, in some embodiments, are compositions comprising an oligonucleotide that targets ANGPTL4 and when administered to a subject in an effective amount decreases circulating triglycerides, decreases circulating glucose, decreases a liver steatosis measurement, increases circulating high-density lipoproteins (HDL), or increases insulin sensitivity; wherein the oligonucleotide comprises a small interfering RNA (siRNA) comprising a sense strand comprising modification pattern 7S, 8S, or 9S, and/or an antisense strand comprising modification pattern 10AS or 11AS. Disclosed herein, in some embodiments, are compositions comprising an oligonucleotide that targets ANGPTL4 and when administered to a subject in an effective amount decreases circulating triglycerides, decreases circulating glucose, decreases a liver steatosis measurement, increases circulating high-density lipoproteins (HDL), or increases insulin sensitivity; wherein any one of the following is true with regard to a strand of the oligonucleotide: all purines comprise 2′ fluoro modified purines, and all pyrimidines comprise a mixture of 2′ fluoro and 2′ methyl modified pyrimidines, all purines comprise 2′ methyl modified purines, and all pyrimidines comprise a mixture of 2′ fluoro and 2′ methyl modified pyrimidines, all purines comprise 2′ fluoro modified purines, and all pyrimidines comprise 2′ methyl modified pyrimidines, all pyrimidines comprise 2′ fluoro modified pyrimidines, and all purines comprise a mixture of 2′ fluoro and 2′ methyl modified purines, all pyrimidines comprise 2′ methyl modified pyrimidines, and all purines comprise a mixture of 2′ fluoro and 2′ methyl modified purines, or all pyrimidines comprise 2′ fluoro modified pyrimidines, and all purines comprise 2′ methyl modified purines. In some embodiments, the increase or decrease is by about 10% or more, as compared to prior to administration. Disclosed herein, in some embodiments, are compositions comprising an oligonucleotide that targets ANGPTL4 and when administered to a subject in an effective amount decreases a liver steatosis measurement in the subject. In some embodiments, the decrease is by about 10% or more, as compared to prior to administration. In some embodiments, the oligonucleotide comprises modification pattern 1S, 2S, 3S, 4S, 5S, 6S, 7S, 8S, 9S, 1AS, 2AS, 3AS, 4AS, 5AS, 6AS, 7AS, 8AS, 9AS, 10AS, or 11AS. In some embodiments, the oligonucleotide comprises modification pattern 1S, 2S, 3S, 4S, 5S, 6S, 7S, 8S, 9S, 10S, 11S, 12S, 13S, 14S, 15S, 16S, 1AS, 2AS, 3AS, 4AS, 5AS, 6AS, 7AS, 8AS, 9AS, 10AS, 11AS, 12AS, 13AS, 14AS, or 15AS. In some embodiments, any one of the following is true with regard to a strand of the oligonucleotide: all purines comprise 2′ fluoro modified purines, and all pyrimidines comprise a mixture of 2′ fluoro and 2′ methyl modified pyrimidines, all purines comprise 2′ methyl modified purines, and all pyrimidines comprise a mixture of 2′ fluoro and 2′ methyl modified pyrimidines, all purines comprise 2′ fluoro modified purines, and all pyrimidines comprise 2′ methyl modified pyrimidines, all pyrimidines comprise 2′ fluoro modified pyrimidines, and all purines comprise a mixture of 2′ fluoro and 2′ methyl modified purines, all pyrimidines comprise 2′ methyl modified pyrimidines, and all purines comprise a mixture of 2′ fluoro and 2′ methyl modified purines, or all pyrimidines comprise 2′ fluoro modified pyrimidines, and all purines comprise 2′ methyl modified purines. In some embodiments, the composition comprises an siRNA. In some embodiments, the composition comprises an antisense oligonucleotide (ASO). In some embodiments, the oligonucleotide comprises a N-acetylgalactosamine (GalNAc) moiety attached to a 5′ or 3′ end of the oligonucleotide. In some embodiments, the composition comprises:

[chemical structure]

wherein J comprises the oligonucleotide, and wherein J comprises an optional phosphate or phosphorothioate linking to the oligonucleotide. Disclosed herein, in some embodiments, are compositions comprising an siRNA comprising a sense strand comprising a GalNAc moiety attached at a 5′ or 3′ end and the nucleotide sequence of SEQ ID NO: 14005 or 14299, and an antisense strand having the nucleotide sequence of SEQ ID NO: 14298 or 14153. In some embodiments, the sense strand comprises the nucleotide sequence of SEQ ID NO: 14005. In some embodiments, the sense strand comprises the nucleotide sequence of SEQ ID NO: 14299. In some embodiments, the antisense strand comprises the nucleotide sequence of SEQ ID NO: 14298. In some embodiments, the antisense strand comprises the nucleotide sequence of SEQ ID NO: 14153.

[0004] Disclosed herein, in some embodiments, are methods of reducing an ANGPTL4 protein or mRNA measurement in the liver of a subject, comprising administering an effective amount of a composition described herein. In some embodiments, the subject is a primate. Disclosed herein, in some embodiments, are methods of treating a subject having a liver disease, comprising administering an effective amount of a composition described herein. In some embodiments, the liver disease comprises nonalcoholic fatty liver disease (NAFLD) or non-alcoholic steatohepatitis (NASH).

### DETAILED DESCRIPTION

[0005] Oligonucleotides that target the expression of genes involved in cardiometabolic diseases may be useful for treating such diseases. Cardiometabolic diseases may often be exacerbated or result from obesity, which may affect a large percent of the population. Such diseases may include nonalcoholic fatty liver disease (NAFLD) or non-alcoholic steatohepatitis (NASH), and may be characterized by liver steatosis. Oligonucleotides may be targeted to the liver using a moiety such as a N-acetylgalactosamine (GalNAc) moiety, and then combat the disease by targeting the mRNA of a gene involved in the disease. Additionally, specific nucleic acid modification patterns may be used to improve oligonucleotide stability or effectiveness.

[0006] Identification of which genes are involved in cardiometabolic diseases may be useful for determining which genes to target for treating these diseases. Large-scale human genetic data can improve the success rate of pharmaceutical discovery and development. A Genome Wide Association Study (GWAS) may detect associations between genetic variants and traits in a population sample. A GWAS may enable better understanding of the biology of disease, and provide applicable treatments. A GWAS can utilize genotyping and/or sequencing data, and often involves an evaluation of millions of genetic variants that are relatively evenly distributed across the genome. The most common GWAS design is the case-control study, which involves comparing variant frequencies in cases versus controls. If a variant has a significantly different frequency in cases versus controls, that variant is said to be associated with disease. Association statistics that may be used in a GWAS are p-values, as a measure of statistical significance; odds ratios (OR), as a measure of effect size; or beta coefficients (beta), as a measure of effect size. Researchers often assume an additive genetic model and calculate an allelic odds ratio, which is the increased (or decreased) risk of disease conferred by each additional copy of an allele (compared to carrying no copies of that allele). An additional concept in design and interpretation of GWAS is that of linkage disequilibrium, which is the non-random association of alleles. The presence of linkage disequilibrium can obfuscate which variant is “causal.”

[0007] Functional annotation of variants and/or wet lab experimentation can identify the causal genetic variant identified via GWAS, and in many cases may lead to the identification of disease-causing genes. In particular, understanding the functional effect of a causal genetic variant (for example, loss of protein function, gain of protein function, increase in gene expression, or decrease in gene expression) may allow that variant to be used as a proxy for therapeutic modulation of the target gene, or to gain insight into potential therapeutic efficacy and safety of a therapeutic that modulates that target.

[0008] Identification of such gene-disease associations has provided insights into disease biology and may be used to identify novel therapeutic targets for the pharmaceutical industry. In order to translate the therapeutic insights derived from human genetics, disease biology in patients may be exogenously ‘programmed’ into replicating the observation from human genetics. There are several potential options for therapeutic modalities that may be brought to bear in translating therapeutic targets identified via human genetics into novel medicines. These may include well established therapeutic modalities such as small molecules and monoclonal antibodies, maturing modalities such as oligonucleotides, and emerging modalities such as gene therapy and gene editing. The choice of therapeutic modality can depend on several factors including the location of a target (for example, intracellular, extracellular, or secreted), a relevant tissue (for example, liver) and a relevant indication.

[0009] Cardiovascular and metabolic diseases are leading causes of death, accounting for about one-third of all deaths globally. Angiopoietin-like proteins (ANGPTLs) are regulators of lipoprotein metabolism and may serve as therapeutic targets for modulation of lipid levels and cardiometabolic disease risk. ANGPTLs are a family of eight proteins with some functional similarities to angiopoietins. They typically have a characteristic structure that includes an N-terminal coiled-coil domain that mediates homo-oligomerization and a C-terminal fibrinogen domain involved in signaling.

[0010] Angiopoietin-like 4 (ANGPTL4; UniProt ID Q9BY76) is an endogenous inhibitor of lipoprotein lipase (LPL), an enzyme that hydrolyzes triglycerides contained in triglyceride-rich lipoproteins (TRLs) such as chylomicrons and very low-density lipoproteins. ANGPTL4 is a secreted protein that in humans is often most highly expressed in the liver and adipose tissue. After cellular secretion, ANGPTL4 is often cleaved to 37 kD C-terminal and 15 kD N-terminal fragment, and these oligomerized N-terminal fragments inhibit LPL. In some embodiments, ANGPTL4 is glycosylated. In some embodiments, ANGPTL4 has a coiled-coil N-terminal domain. In some embodiments, ANGPTL4 has a fibrinogen-like C-terminal domain.

[0011] Circulating triglycerides are strong and independent positive predictors of cardiovascular disease risk and all-cause mortality, and are also positively correlated with plasma glucose levels, risk of diabetes, metabolic syndrome, and pancreatitis. Additionally, mutations in TRL genes may cause hereditary disorders including familial chylomicronemia syndrome and familial hypertriglyceridemia. Here, it is shown that genetic variants that cause inactivation of ANGPTL4 in humans are associated with decreased triglycerides, increased HDL and decreased risk of diabetes and cardiovascular disease. Therefore, inhibition of ANGPTL4 may serve as a therapeutic strategy for treatment of a range of cardiometabolic diseases.

[0012] Disclosed herein are compositions comprising an oligonucleotide that targets Angiopoietin-like 4 (ANGPTL4). The oligonucleotide may include a small interfering RNA (siRNA) or an antisense oligonucleotide (ASO). The oligonucleotide may be useful for treating a cardiometabolic disease such as one that involves steatosis of an organ such as liver. Specific modifications are included in the disclosure that may aid in stability and overall effectiveness. Further, the oligonucleotide may be targeted to the liver by use of a moiety such as a GalNAc moiety. Also provided herein are methods of treating a metabolic or cardiovascular disorder by providing an oligonucleotide that targets ANGPTL4 to a subject in need thereof. The oligonucleotide may treat the disorder by reducing steatosis, or another mechanism.

### I. Compositions

[0013] Disclosed herein, in some embodiments, are compositions comprising an oligonucleotide. In some embodiments, the composition comprises an oligonucleotide that targets Angiopoietin-like 4 (ANGPTL4). In some embodiments, the composition consists of an oligonucleotide that targets ANGPTL4. In some embodiments, the oligonucleotide reduces ANGPTL4 mRNA or protein expression in the subject. The oligonucleotide may include a small interfering RNA (siRNA) or an antisense oligonucleotide (ASO). In some embodiments, a composition described herein is used in a method of treating a disorder in a subject in need thereof. Some embodiments relate to a composition comprising an oligonucleotide for use in a method of treating a disorder as described herein. Some embodiments relate to use of a composition comprising an oligonucleotide, in a method of treating a disorder as described herein. In some embodiments, the composition is useful for treating a liver disease such as nonalcoholic fatty liver disease (NAFLD) or non-alcoholic steatohepatitis (NASH), or another metabolic disorder.

[0014] In some embodiments, the composition comprises an oligonucleotide that targets ANGPTL4 and when administered to a subject in an effective amount decreases ANGPTL4 mRNA levels in a cell or tissue. In some embodiments, the cell is a hepatocyte. In some embodiments, the tissue is liver or adipose tissue. In some embodiments, the ANGPTL4 mRNA levels are decreased by about 2.5% or more, about 5% or more, or about 7.5% or more, as compared to prior to administration. In some embodiments, the ANGPTL4 mRNA levels are decreased by about 10% or more, as compared to prior to administration. In some embodiments, the ANGPTL4 mRNA levels are decreased by about 20% or more, about 30% or more, about 40% or more, about 50% or more, about 60% or more, about 70% or more, about 80% or more, about 90% or more, or about 100%, as compared to prior to administration. In some embodiments, the ANGPTL4 mRNA levels are decreased by no more than about 2.5%, no more than about 5%, or no more than about 7.5%, as compared to prior to administration. In some embodiments, the ANGPTL4 mRNA levels are decreased by no more than about 10%, as compared to prior to administration. In some embodiments, the ANGPTL4 mRNA levels are decreased by no more than about 20%, no more than about 30%, no more than about 40%, no more than about 50%, no more than about 60%, no more than about 70%, no more than about 80%, or no more than about 90%, as compared to prior to administration. In some embodiments, the ANGPTL4 mRNA levels are decreased by 2.5%, 5%, 7.5%, 10%, 15%, 20%, 25%, 30%, 35%, 40%, 45%, 50%, 55%, 60%, 65%, 70%, 75%, 80%, 85%, 90%, 95%, or 100%, or by a range defined by any of the two aforementioned percentages.

[0015] In some embodiments, the composition comprises an oligonucleotide that targets ANGPTL4 and when administered to a subject in an effective amount decreases circulating ANGPTL4 protein levels in a cell or tissue. In some embodiments, the composition comprises an oligonucleotide that targets ANGPTL4 and when administered to a subject in an effective amount decreases ANGPTL4 protein levels in a fluid such as blood, serum or plasma. In some embodiments, the ANGPTL4 protein levels are decreased by about 2.5% or more, about 5% or more, or about 7.5% or more, as compared to prior to administration. In some embodiments, the ANGPTL4 protein levels are decreased by about 10% or more, as compared to prior to administration. In some embodiments, the ANGPTL4 protein levels are decreased by about 20% or more, about 30% or more, about 40% or more, about 50% or more, about 60% or more, about 70% or more, about 80% or more, about 90% or more, or about 100%, as compared to prior to administration. In some embodiments, the ANGPTL4 protein levels are decreased by no more than about 2.5%, no more than about 5%, or no more than about 7.5%, as compared to prior to administration. In some embodiments, the ANGPTL4 protein levels are decreased by no more than about 10%, as compared to prior to administration. In some embodiments, the ANGPTL4 protein levels are decreased by no more than about 20%, no more than about 30%, no more than about 40%, no more than about 50%, no more than about 60%, no more than about 70%, no more than about 80%, or no more than about 90%, as compared to prior to administration. In some embodiments, the ANGPTL4 protein levels are decreased by 2.5%, 5%, 7.5%, 10%, 15%, 20%, 25%, 30%, 35%, 40%, 45%, 50%, 55%, 60%, 65%, 70%, 75%, 80%, 85%, 90%, 95%, or 100%, or by a range defined by any of the two aforementioned percentages.

[0016] In some embodiments, the composition comprises an oligonucleotide that targets ANGPTL4 and when administered to a subject in an effective amount decreases circulating triglycerides. In some embodiments, the triglycerides are decreased by about 2.5% or more, about 5% or more, or about 7.5% or more, as compared to prior to administration. In some embodiments, the triglycerides are decreased by about 10% or more, as compared to prior to administration. In some embodiments, the triglycerides are decreased by about 20% or more, about 30% or more, about 40% or more, about 50% or more, about 60% or more, about 70% or more, about 80% or more, or about 90% or more, as compared to prior to administration. In some embodiments, the triglycerides are decreased by no more than about 2.5%, no more than about 5%, or no more than about 7.5%, as compared to prior to administration. In some embodiments, the triglycerides are decreased by no more than about 10%, as compared to prior to administration. In some embodiments, the triglycerides are decreased by no more than about 20%, no more than about 30%, no more than about 40%, no more than about 50%, no more than about 60%, no more than about 70%, no more than about 80%, or no more than about 90%, as compared to prior to administration. In some embodiments, the triglycerides are decreased by 2.5%, 5%, 7.5%, 10%, 15%, 20%, 25%, 30%, 35%, 40%, 45%, 50%, 55%, 60%, 65%, 70%, 75%, 80%, 85%, or 90%, or by a range defined by any of the two aforementioned percentages.

[0017] In some embodiments the composition comprises an oligonucleotide that targets ANGPTL4 and when administered to a subject in an effective amount decreases circulating cholesterol. In some embodiments, the circulating cholesterol comprises circulating total cholesterol. In some embodiments, the circulating cholesterol is decreased by about 2.5% or more, about 5% or more, or about 7.5% or more, as compared to prior to administration. In some embodiments, the circulating cholesterol is decreased by about 10% or more, as compared to prior to administration. In some embodiments, the circulating cholesterol is decreased by about 20% or more, about 30% or more, about 40% or more, about 50% or more, about 60% or more, about 70% or more, about 80% or more, or about 90% or more, as compared to prior to administration. In some embodiments, the cholesterol is decreased by no more than about 2.5%, no more than about 5%, or no more than about 7.5%, as compared to prior to administration. In some embodiments, the cholesterol is decreased by no more than about 10%, as compared to prior to administration. In some embodiments, the cholesterol is decreased by no more than about 20%, no more than about 30%, no more than about 40%, no more than about 50%, no more than about 60%, no more than about 70%, no more than about 80%, or no more than about 90%, as compared to prior to administration. In some embodiments, the circulating cholesterol is decreased by 2.5%, 5%, 7.5%, 10%, 15%, 20%, 25%, 30%, 35%, 40%, 45%, 50%, 55%, 60%, 65%, 70%, 75%, 80%, 85%, or 90%, or by a range defined by any of the two aforementioned percentages.

[0018] In some embodiments, the composition comprises an oligonucleotide that targets ANGPTL4 and when administered to a subject in an effective amount increases circulating high-density lipoproteins (HDL). In some embodiments, the circulating HDL are increased by about 2.5% or more, about 5% or more, or about 7.5% or more, as compared to prior to administration. In some embodiments, the circulating HDL are increased by about 10% or more, as compared to prior to administration. In some embodiments, the circulating HDL are increased by about 20% or more, about 30% or more, about 40% or more, about 50% or more, about 60% or more, about 70% or more, about 80% or more, about 90% or more, or about 100% or more as compared to prior to administration. In some embodiments, the circulating HDL are increased by about 200% or more, about 300% or more, about 400% or more, about 500% or more, about 600% or more, about 700% or more, about 800% or more, about 900% or more, or about 1000% or more, as compared to prior to administration. In some embodiments, the HDL is decreased by no more than about 2.5%, no more than about 5%, or no more than about 7.5%, as compared to prior to administration. In some embodiments, the HDL is decreased by no more than about 10%, as compared to prior to administration. In some embodiments, the HDL is decreased by no more than about 20%, no more than about 30%, no more than about 40%, no more than about 50%, no more than about 60%, no more than about 70%, no more than about 80%, no more than about 90%, or no more than about 100% as compared to prior to administration. In some embodiments, the HDL is decreased by no more than about 200%, no more than about 300%, no more than about 400%, no more than about 500%, no more than about 600%, no more than about 700%, no more than about 800%, no more than about 900%, or no more than about 1000%, as compared to prior to administration. In some embodiments, the circulating HDL are increased by 2.5%, 5%, 7.5%, 10%, 15%, 20%, 25%, 30%, 35%, 40%, 45%, 50%, 55%, 60%, 65%, 70%, 75%, 80%, 85%, 90%, 95%, 100%, 200% 300%, 400%, 500%, 600%, 700%, 800%, 900%, 1000%, or by a range defined by any of the two aforementioned percentages.

[0019] In some embodiments, the composition comprises an oligonucleotide that targets ANGPTL4 and when administered to a subject in an effective amount decreases circulating glucose. In some embodiments, the circulating glucose is decreased by about 2.5% or more, about 5% or more, or about 7.50% or more, as compared to prior to administration. In some embodiments, the circulating glucose is decreased by about 10% or more, as compared to prior to administration. In some embodiments, the circulating glucose is decreased by about 20% or more, about 30% or more, about 40% or more, about 50% or more, about 60% or more, about 70% or more, about 80% or more, or about 90% or more, as compared to prior to administration. In some embodiments, the glucose is decreased by no more than about 2.5%, no more than about 5%, or no more than about 7.5%, as compared to prior to administration. In some embodiments, the glucose is decreased by no more than about 10%, as compared to prior to administration. In some embodiments, the glucose is decreased by no more than about 20%, no more than about 30%, no more than about 40%, no more than about 50%, no more than about 60%, no more than about 70%, no more than about 80%, or no more than about 90%, as compared to prior to administration. In some embodiments, the circulating glucose is decreased by 2.5%, 5%, 7.5%, 10%, 15%, 20%, 25%, 30%, 35%, 40%, 45%, 50%, 55%, 60%, 65%, 70%, 75%, 80%, 85%, or 90%, or by a range defined by any of the two aforementioned percentages.

[0020] In some embodiments, the composition comprises an oligonucleotide that targets ANGPTL4 and when administered to a subject in an effective amount increases insulin sensitivity. In some embodiments, the insulin sensitivity is increased by about 2.5% or more, about 5% or more, or about 7.5% or more, as compared to prior to administration. In some embodiments, the insulin sensitivity is increased by about 10% or more, as compared to prior to administration. In some embodiments, the insulin sensitivity is increased by about 20% or more, about 30% or more, about 40% or more, about 50% or more, about 60% or more, about 70% or more, about 80% or more, about 90% or more, or about 100%, or more as compared to prior to administration. In some embodiments, the insulin sensitivity is increased by about 200% or more, about 300% or more, about 400% or more, about 500% or more, about 600% or more, about 700% or more, about 800% or more, about 900% or more, or about 1000% or more, as compared to prior to administration. In some embodiments, the insulin sensitivity is increased by no more than about 2.5%, no more than about 5%, or no more than about 7.5%, as compared to prior to administration. In some embodiments, the insulin sensitivity is increased by no more than about 10%, as compared to prior to administration. In some embodiments, the insulin sensitivity is increased by no more than about 20%, no more than about 30%, no more than about 40%, no more than about 50%, no more than about 60%, no more than about 70%, no more than about 80%, no more than about 90%, or no more than about 100% as compared to prior to administration. In some embodiments, the insulin sensitivity is increased by no more than about 200%, no more than about 300%, no more than about 400%, no more than about 500%, no more than about 600%, no more than about 700%, no more than about 800%, no more than about 900%, or no more than about 1000%, as compared to prior to administration. In some embodiments, the insulin sensitivity is increased by 2.5%, 5%, 7.5%, 10%, 15%, 20%, 25%, 30%, 35%, 40%, 45%, 50%, 55%, 60%, 65%, 70%, 75%, 80%, 85%, 90%, 95%, 100%, 200% 300%, 400%, 500%, 600%, 700%, 800%, 900%, 1000%, or by a range defined by any of the two aforementioned percentages.

[0021] In some embodiments, the composition comprises an oligonucleotide that targets ANGPTL4 and when administered to a subject in an effective amount decreases circulating insulin. In some embodiments, the circulating insulin is decreased by about 2.5% or more, about 5% or more, or about 7.50% or more, as compared to prior to administration. In some embodiments, the circulating insulin is decreased by about 10% or more, as compared to prior to administration. In some embodiments, the circulating insulin is decreased by about 20% or more, about 30% or more, about 40% or more, about 50% or more, about 60% or more, about 70% or more, about 80% or more, or about 90% or more, as compared to prior to administration. In some embodiments, the insulin is decreased by no more than about 2.5%, no more than about 5%, or no more than about 7.5%, as compared to prior to administration. In some embodiments, the insulin is decreased by no more than about 10%, as compared to prior to administration. In some embodiments, the insulin is decreased by no more than about 20%, no more than about 30%, no more than about 40%, no more than about 50%, no more than about 60%, no more than about 70%, no more than about 80%, or no more than about 90%, as compared to prior to administration. In some embodiments, the circulating insulin is decreased by 2.5%, 5%, 7.5%, 10%, 15%, 20%, 25%, 30%, 35%, 40%, 45%, 50%, 55%, 60%, 65%, 70%, 75%, 80%, 85%, or 90%, or by a range defined by any of the two aforementioned percentages.

[0022] In some embodiments, the composition comprises an oligonucleotide that targets ANGPTL4 and when administered to a subject in an effective amount decreases a liver steatosis measurement. In some embodiments, the liver steatosis measurement is decreased by about 2.5% or more, about 5% or more, or about 7.5% or more, as compared to prior to administration. In some embodiments, the liver steatosis measurement is decreased by about 10% or more, as compared to prior to administration. In some embodiments, the liver steatosis measurement is decreased by about 20% or more, about 30% or more, about 40% or more, about 50% or more, about 60% or more, about 70% or more, about 80% or more, about 90% or more, or about 100%, as compared to prior to administration. In some embodiments, the insulin is decreased by no more than about 2.5%, no more than about 5%, or no more than about 7.5%, as compared to prior to administration. In some embodiments, the insulin is decreased by no more than about 10%, as compared to prior to administration. In some embodiments, the insulin is decreased by no more than about 20%, no more than about 30%, no more than about 40%, no more than about 50%, no more than about 60%, no more than about 70%, no more than about 80%, or no more than about 90%, as compared to prior to administration. In some embodiments, the liver steatosis measurement is decreased by 2.5%, 5%, 7.5%, 10%, 15%, 20%, 25%, 30%, 35%, 40%, 45%, 50%, 55%, 60%, 65%, 70%, 75%, 80%, 85%, 90%, 95%, or 100%, or by a range defined by any of the two aforementioned percentages.

A. siRNAs

[0023] In some embodiments, the composition comprises an oligonucleotide that targets Angiopoietin-like 4 (ANGPTL4), wherein the oligonucleotide comprises a small interfering RNA (siRNA). In some embodiments, the composition comprises an oligonucleotide that targets Angiopoietin-like 4 (ANGPTL4), wherein the oligonucleotide comprises a small interfering RNA (siRNA) comprising a sense strand and an antisense strand. In some embodiments, the sense strand comprises RNA. In some embodiments, the antisense strand comprises RNA.

[0024] In some embodiments, the siRNA comprises a sense strand and an antisense strand, the antisense strand being complementary with no more than 2 mismatches to a portion of a nucleic acid having the nucleoside sequence of SEQ ID NO: 13936, and each strand having 12 to 30 nucleotides. In some embodiments, the siRNA comprises a sense strand and an antisense strand, the antisense strand being complementary with no more than 2 mismatches to a portion of a nucleic acid having the nucleoside sequence of SEQ ID NO: 13935, and each strand having 12 to 30 nucleotides.

[0025] In some embodiments, the siRNA comprises a sense strand and an antisense strand, the antisense strand being 100% complementary to a portion of a nucleic acid having the nucleoside sequence of SEQ ID NO: 13936, and each strand having 12 to 30 nucleotides. In some embodiments, the siRNA comprises a sense strand and an antisense strand, the antisense strand being 100% complementary to a portion of a nucleic acid having the nucleoside sequence of SEQ ID NO: 13935, and each strand having 12 to 30 nucleotides.

[0026] In some embodiments, the composition comprises an oligonucleotide that inhibits the expression of ANGPTL4, wherein the oligonucleotide comprises an siRNA comprising a sense strand and an antisense strand, wherein the sense strand is 10-30 nucleosides in length. In some embodiments, the composition comprises a sense strange that is at least about 10, 11, 12, 13, 14, 15, 15, 17, 18, 19, 20, 21, 22, 23, 24, 25, 26, 27, 28, 29, or 30 nucleosides in length, or a range defined by any of the two aforementioned numbers. The sense strand may be 12-30 or 14-30 nucleosides in length. In some embodiments, the composition comprises an antisense strand is 10-30 nucleosides in length. In some embodiments, the composition comprises an antisense strange that is at least about 10, 11, 12, 13, 14, 15, 15, 17, 18, 19, 20, 21, 22, 23, 24, 25, 26, 27, 28, 29, or 30 nucleosides in length, or a range defined by any of the two aforementioned numbers. The antisense strand may be 12-30 or 14-30 nucleosides in length.

[0027] In some embodiments, the composition comprises an oligonucleotide that inhibits the expression of ANGPTL4, wherein the oligonucleotide comprises an siRNA comprising a sense strand and an antisense strand, each strand is independently about 12-30 nucleosides in length, and at least one of the sense strand and the antisense strand comprises a nucleoside sequence comprising about 12-30 contiguous nucleosides of a full-length human ANGPTL4 mRNA sequence such as SEQ ID NO: 13935. In some embodiments, at least one of the sense strand and the antisense strand comprise a nucleoside sequence comprising at least about 10, 11, 12, 13, 14, 15, 15, 17, 18, 19, 20, 21, 22, 23, 24, 25, 26, 27, 28, 29, 30, or more contiguous nucleosides of one of SEQ ID NO: 13935.

[0028] In some embodiments, the composition comprises an oligonucleotide that inhibits the expression of ANGPTL4, wherein the oligonucleotide comprises an siRNA comprising a sense strand and an antisense strand, each strand is independently about 12-30 nucleosides in length, and at least one of the sense strand and the antisense strand comprises a nucleoside sequence comprising about 12-30 contiguous nucleosides of a full-length human ANGPTL4 pre-mRNA sequence SEQ ID NO: 13936. In some embodiments, at least one of the sense strand and the antisense strand comprise a nucleoside sequence comprising at least about 10, 11, 12, 13, 14, 15, 15, 17, 18, 19, 20, 21, 22, 23, 24, 25, 26, 27, 28, 29, 30, or more contiguous nucleosides of one of SEQ ID NO: 13936.

[0029] In some embodiments, the composition comprises an oligonucleotide that inhibits the expression of ANGPTL4, wherein the oligonucleotide comprises an siRNA comprising a sense strand and an antisense strand, wherein the sense strand and the antisense strand form a double-stranded RNA duplex. In some embodiments, the first base pair of the double-stranded RNA duplex is an AU base pair.

[0030] In some embodiments, the composition comprises an oligonucleotide that inhibits the expression of ANGPTL4, wherein the oligonucleotide comprises an siRNA comprising a sense strand and an antisense strand, wherein the sense strand comprises a nucleoside sequence comprising or consisting of the sequence of any one of SEQ ID NOs: 1-1854 or 13970-13977, or a nucleic acid sequence thereof having 1 or 2 nucleoside substitutions, additions, or deletions. In some embodiments, the sense strand comprises a nucleoside sequence comprising or consisting of the sequence of any one of SEQ ID NOs: 1-1854 or 13970-13977, or a nucleic acid sequence thereof having 3 or 4 nucleoside substitutions, additions, or deletions. In some embodiments, the sense strand further comprises a 3′ overhang. In some embodiments, the 3′ overhang comprises 1, 2, 3, 4, 5, 6, 7, 8, 9, or 10 nucleosides, or a range of nucleotides defined by any two of the aforementioned numbers. In some embodiments, the 3′ overhang comprises 1, 2, or more nucleosides. In some embodiments, the 3′ overhang comprises 2 nucleosides. In some embodiments, the sense strand further comprises a 5′ overhang. In some embodiments, the 5′ overhang comprises 1, 2, 3, 4, 5, 6, 7, 8, 9, or 10 nucleosides, or a range of nucleotides defined by any two of the aforementioned numbers. In some embodiments, the 5′ overhang comprises 1, 2, or more nucleosides. In some embodiments, the 5′ overhang comprises 2 nucleosides. In some embodiments, the sense strand comprises a nucleoside sequence comprising or consisting of the sequence of any one of SEQ ID NOs: 1-1854 or 13970-13977, or a nucleic acid sequence thereof having 1 or 2 nucleoside additions at the 3′ end. The sequence of any one of SEQ ID NOs: 1-1854 or 13970-13977 may include sequence of any one of SEQ ID NOs: 1-1854. The sequence of any one of SEQ ID NOs: 1-1854 or 13970-13977 may include sequence of any one of SEQ ID NOs: 13970-13977.

[0031] In some embodiments, the composition comprises an oligonucleotide that inhibits the expression of ANGPTL4, wherein the oligonucleotide comprises an siRNA comprising a sense strand and an antisense strand, wherein the sense strand comprises a nucleoside sequence comprising or consisting of the sequence of any one of SEQ ID NOs: 1-1854 or 13970-13977.

[0032] In some embodiments, the composition comprises an oligonucleotide that inhibits the expression of ANGPTL4, wherein the oligonucleotide comprises an siRNA comprising a sense strand and an antisense strand, wherein the antisense strand comprises a nucleoside sequence comprising or consisting of the sequence of any one of SEQ ID NOs: 1855-3708 or 13978-13985, or a nucleic acid sequence thereof having 1 or 2 nucleoside substitutions, additions, or deletions. In some embodiments, the antisense strand sequence comprises a nucleoside sequence comprising or consisting of the sequence of any one of SEQ ID NOs: 1855-3708 or 13978-13985, or a nucleic acid sequence thereof having 3 or 4 nucleoside substitutions, additions, or deletions. In some embodiments, the antisense strand further comprises a 3′ overhang. In some embodiments, the 3′ overhang comprises 1, 2, 3, 4, 5, 6, 7, 8, 9, or 10 nucleosides, or a range of nucleotides defined by any two of the aforementioned numbers. In some embodiments, the 3′ overhang comprises 1, 2, or more nucleosides. In some embodiments, the 3′ overhang comprises 2 nucleosides. In some embodiments, the antisense strand further comprises a 5′ overhang. In some embodiments, the 5′ overhang comprises 1, 2, 3, 4, 5, 6, 7, 8, 9, or 10 nucleosides, or a range of nucleotides defined by any two of the aforementioned numbers. In some embodiments, the 5′ overhang comprises 1, 2, or more nucleosides. In some embodiments, the 5′ overhang comprises 2 nucleosides. In some embodiments, the antisense strand comprises a nucleoside sequence comprising or consisting of the sequence of any one of SEQ ID NOs: 1855-3708 or 13978-13985, or a nucleic acid sequence thereof having 1 or 2 nucleoside additions at the 3′ end. The sequence of any one of SEQ ID NOs: 1855-3708 or 13978-13985 may include sequence of any one of SEQ ID NOs: 1855-3708. The sequence of any one of SEQ ID NOs: 1855-3708 or 13978-13985 may include sequence of any one of SEQ ID NOs: 13978-13985.

[0033] In some embodiments, the composition comprises an oligonucleotide that inhibits the expression of ANGPTL4, wherein the oligonucleotide comprises an siRNA comprising a sense strand and an antisense strand, wherein the antisense strand comprises a nucleoside sequence comprising or consisting of the sequence of any one of SEQ ID NOs: 1855-3708 or 13978-13985.

[0034] In some embodiments, the composition comprises an oligonucleotide that inhibits the expression of ANGPTL4, wherein the oligonucleotide comprises an siRNA comprising a sense strand and an antisense strand, wherein the siRNA binds with a 19mer in a human ANGPTL4 mRNA. In some embodiments, the siRNA binds with a 12mer, a 13mer, a 14mer, a 15mer, a 16mer, a 17mer, a 18mer, a 19mer, a 20mer, a 21mer, a 22mer, a 23mer, a 24mer, or a 25mer in a human ANGPTL4 mRNA.

[0035] In some embodiments, the composition comprises an oligonucleotide that inhibits the expression of ANGPTL4, wherein the oligonucleotide comprises an siRNA comprising a sense strand and an antisense strand, wherein the siRNA binds with a 17mer in a non-human primate ANGPTL4 mRNA. In some embodiments, the siRNA binds with a 12mer, a 13mer, a 14mer, a 15mer, a 16mer, a 17mer, a 18mer, a 19mer, a 20mer, a 21mer, a 22mer, a 23mer, a 24mer, or a 25mer in a non-human primate ANGPTL4 mRNA.

[0036] In some embodiments, the composition comprises an oligonucleotide that inhibits the expression of ANGPTL4, wherein the oligonucleotide comprises an siRNA comprising a sense strand and an antisense strand, wherein the siRNA binds with a 19mer in a human ANGPTL4 mRNA, or a combination thereof. In some embodiments, the siRNA binds with a 12mer, a 13mer, a 14mer, a 15mer, a 16mer, a 17mer, and 18mer, a 19mer, a 20mer, a 21mer, a 22mer, a 23mer, a 24mer, or a 25mer in a human ANGPTL4 mRNA.

[0037] In some embodiments, the composition comprises an oligonucleotide that inhibits the expression of ANGPTL4, wherein the oligonucleotide comprises an siRNA comprising a sense strand and an antisense strand, wherein the siRNA binds with a human ANGPTL4 mRNA and less than or equal to 20 human off-targets, with no more than 2 mismatches in the antisense strand. In some embodiments, the siRNA binds with a human ANGPTL4 mRNA and less than or equal to 10 human off-targets, with no more than 2 mismatches in the antisense strand. In some embodiments, the siRNA binds with a human ANGPTL4 mRNA and less than or equal to 30 human off-targets, with no more than 2 mismatches in the antisense strand. In some embodiments, the siRNA binds with a human ANGPTL4 mRNA and less than or equal to 40 human off-targets, with no more than 2 mismatches in the antisense strand. In some embodiments, the siRNA binds with a human ANGPTL4 mRNA and less than or equal to 50 human off-targets, with no more than 2 mismatches in the antisense strand. In some embodiments, the siRNA binds with a human ANGPTL4 mRNA and less than or equal to 10 human off-targets, with no more than 3 mismatches in the antisense strand. In some embodiments, the siRNA binds with a human ANGPTL4 mRNA and less than or equal to 20 human off-targets, with no more than 3 mismatches in the antisense strand. In some embodiments, the siRNA binds with a human ANGPTL4 mRNA and less than or equal to 30 human off-targets, with no more than 3 mismatches in the antisense strand. In some embodiments, the siRNA binds with a human ANGPTL4 mRNA and less than or equal to 40 human off-targets, with no more than 3 mismatches in the antisense strand. In some embodiments, the siRNA binds with a human ANGPTL4 mRNA and less than or equal to 50 human off-targets, with no more than 3 mismatches in the antisense strand.

[0038] In some embodiments, the composition comprises an oligonucleotide that inhibits the expression of ANGPTL4, wherein the oligonucleotide comprises an siRNA comprising a sense strand and an antisense strand, siRNA binds with a human ANGPTL4 mRNA target site that does not harbor an SNP, with a minor allele frequency (MAF) greater or equal to 1% (pos. 2-18). In some embodiments, the MAF is greater or equal to about 2%, about 3%, about 4%, about 5%, about 6%, about 7%, about 8%, about 9%, about 10%, about 11%, about 12%, about 13%, about 14%, about 15%, about 16%, about 17%, about 18%, about 19%, or about 20%.

[0039] In some embodiments, the composition comprises an oligonucleotide that inhibits the expression of ANGPTL4, wherein the oligonucleotide comprises an siRNA comprising a sense strand and an antisense strand, wherein the sense strand comprises the nucleoside sequence of any one of SEQ ID NOs: 32, 33, 34, 35, 36, 56, 57, 58, 59, 61, 62, 63, 64, 79, 80, 84, 111, 112, 116, 117, 118, 119, 120, 121, 125, 126, 127, 128, 129, 149, 150, 152, 153, 154, 157, 158, 159, 161, 164, 165, 166, 167, 168, 169, 172, 174, 175, 177, 196, 198, 199, 210, 211, 212, 214, 215, 216, 217, 218, 219, 221, 222, 223, 228, 230, 231, 240, 241, 245, 246, 250, 252, 253, 254, 255, 260, 261, 262, 263, 265, 266, 271, 272, 274, 280, 282, 289, 290, 291, 292, 293, 299, 304, 321, 323, 325, 326, 328, 329, 330, 331, 332, 333, 334, 335, 337, 338, 339, 342, 347, 349, 350, 352, 353, 356, 377, 380, 382, 386, 388, 391, 392, 393, 394, 397, 398, 399, 402, 404, 405, 411, 412, 413, 414, 415, 417, 419, 420, 421, 422, 423, 424, 425, 426, 427, 428, 429, 430, 431, 435, 481, 484, 506, 509, 517, 519, 520, 565, 570, 571, 572, 589, 607, 608, 610, 611, 612, 616, 617, 620, 623, 635, 637, 640, 643, 653, 672, 673, 674, 675, 676, 677, 678, 679, 681, 682, 683, 684, 686, 687, 689, 692, 695, 830, 834, 841, 842, 843, 844, 850, 851, 852, 853, 854, 856, 857, 859, 866, 868, 871, 872, 876, 887, 888, 890, 892, 893, 894, 897, 900, 902, 907, 911, 912, 913, 914, 915, 916, 917, 918, 919, 920, 921, 922, 925, 945, 968, 1001, 1002, 1005, 1006, 1009, 1010, 1011, 1013, 1028, 1032, 1037, 1052, 1053, 1054, 1055, 1057, 1058, 1064, 1112, 1122, 1124, 1126, 1127, 1133, 1134, 1136, 1137, 1147, 1148, 1149, 1151, 1153, 1154, 1155, 1157, 1158, 1161, 1162, 1163, 1164, 1165, 1166, 1171, 1172, 1175, 1181, 1182, 1184, 1248, 1249, 1252, 1253, 1259, 1276, 1285, 1310, 1315, 1338, 1343, 1347, 1348, 1349, 1350, 1351, 1352, 1378, 1405, 1407, 1413, 1414, 1415, 1416, 1417, 1418, 1429, 1430, 1448, 1477, 1487, 1488, 1489, 1493, 1494, 1519, 1523, 1538, 1556, 1561, 1563, 1564, 1565, 1570, 1571, 1572, 1580, 1581, 1589, 1597, 1598, 1601, 1602, 1603, 1604, 1605, 1606, 1610, 1611, 1613, 1614, 1617, 1693, 1699, 1701, 1702, 1703, 1722, 1740, 1741, 1742, 1745, 1747, 1748, 1749, 1751, 1754, 1755, 1779, 1780, 1784, 1787, 1788, 1798, 1799, 1800, 1801, 1802, or 1803, or a nucleic acid sequence thereof having 1 or 2 nucleoside substitutions, additions, or deletions; and/or the antisense strand comprises the nucleoside sequence of any one of SEQ ID NOs: 1886, 1887, 1888, 1889, 1890, 1910, 1911, 1912, 1913, 1915, 1916, 1917, 1918, 1933, 1934, 1938, 1965, 1966, 1970, 1971, 1972, 1973, 1974, 1975, 1979, 1980, 1981, 1982, 1983, 2003, 2004, 2006, 2007, 2008, 2011, 2012, 2013, 2015, 2018, 2019, 2020, 2021, 2022, 2023, 2026, 2028, 2029, 2031, 2050, 2052, 2053, 2064, 2065, 2066, 2068, 2069, 2070, 2071, 2072, 2073, 2075, 2076, 2077, 2082, 2084, 2085, 2094, 2095, 2099, 2100, 2104, 2106, 2107, 2108, 2109, 2114, 2115, 2116, 2117, 2119, 2120, 2125, 2126, 2128, 2134, 2136, 2143, 2144, 2145, 2146, 2147, 2153, 2158, 2175, 2177, 2179, 2180, 2182, 2183, 2184, 2185, 2186, 2187, 2188, 2189, 2191, 2192, 2193, 2196, 2201, 2203, 2204, 2206, 2207, 2210, 2231, 2234, 2236, 2240, 2242, 2245, 2246, 2247, 2248, 2251, 2252, 2253, 2256, 2258, 2259, 2265, 2266, 2267, 2268, 2269, 2271, 2273, 2274, 2275, 2276, 2277, 2278, 2279, 2280, 2281, 2282, 2283, 2284, 2285, 2289, 2335, 2338, 2360, 2363, 2371, 2373, 2374, 2419, 2424, 2425, 2426, 2443, 2461, 2462, 2464, 2465, 2466, 2470, 2471, 2474, 2477, 2489, 2491, 2494, 2497, 2507, 2526, 2527, 2528, 2529, 2530, 2531, 2532, 2533, 2535, 2536, 2537, 2538, 2540, 2541, 2543, 2546, 2549, 2684, 2688, 2695, 2696, 2697, 2698, 2704, 2705, 2706, 2707, 2708, 2710, 2711, 2713, 2720, 2722, 2725, 2726, 2730, 2741, 2742, 2744, 2746, 2747, 2748, 2751, 2754, 2756, 2761, 2765, 2766, 2767, 2768, 2769, 2770, 2771, 2772, 2773, 2774, 2775, 2776, 2779, 2799, 2822, 2855, 2856, 2859, 2860, 2863, 2864, 2865, 2867, 2882, 2886, 2891, 2906, 2907, 2908, 2909, 2911, 2912, 2918, 2966, 2976, 2978, 2980, 2981, 2987, 2988, 2990, 2991, 3001, 3002, 3003, 3005, 3007, 3008, 3009, 3011, 3012, 3015, 3016, 3017, 3018, 3019, 3020, 3025, 3026, 3029, 3035, 3036, 3038, 3102, 3103, 3106, 3107, 3113, 3130, 3139, 3164, 3169, 3192, 3197, 3201, 3202, 3203, 3204, 3205, 3206, 3232, 3259, 3261, 3267, 3268, 3269, 3270, 3271, 3272, 3283, 3284, 3302, 3331, 3341, 3342, 3343, 3347, 3348, 3373, 3377, 3392, 3410, 3415, 3417, 3418, 3419, 3424, 3425, 3426, 3434, 3435, 3443, 3451, 3452, 3455, 3456, 3457, 3458, 3459, 3460, 3464, 3465, 3467, 3468, 3471, 3547, 3553, 3555, 3556, 3557, 3576, 3594, 3595, 3596, 3599, 3601, 3602, 3603, 3605, 3608, 3609, 3633, 3634, 3638, 3641, 3642, 3652, 3653, 3654, 3655, 3656, or 3657, or a nucleic acid sequence thereof having 1 or 2 nucleoside substitutions, additions, or deletions.

[0040] In some embodiments, the composition comprises an oligonucleotide that inhibits the expression of ANGPTL4, wherein the oligonucleotide comprises an siRNA comprising a sense strand and an antisense strand, wherein the sense strand comprises the nucleoside sequence of any one of SEQ ID NOs: 32, 33, 34, 35, 36, 56, 57, 58, 59, 61, 62, 63, 64, 79, 80, 84, 111, 112, 116, 117, 118, 119, 120, 121, 125, 126, 127, 128, 129, 149, 150, 152, 153, 154, 157, 158, 159, 161, 164, 165, 166, 167, 168, 169, 172, 174, 175, 177, 196, 198, 199, 210, 211, 212, 214, 215, 216, 217, 218, 219, 221, 222, 223, 228, 230, 231, 240, 241, 245, 246, 250, 252, 253, 254, 255, 260, 261, 262, 263, 265, 266, 271, 272, 274, 280, 282, 289, 290, 291, 292, 293, 299, 304, 321, 323, 325, 326, 328, 329, 330, 331, 332, 333, 334, 335, 337, 338, 339, 342, 347, 349, 350, 352, 353, 356, 377, 380, 382, 386, 388, 391, 392, 393, 394, 397, 398, 399, 402, 404, 405, 411, 412, 413, 414, 415, 417, 419, 420, 421, 422, 423, 424, 425, 426, 427, 428, 429, 430, 431, 435, 481, 484, 506, 509, 517, 519, 520, 565, 570, 571, 572, 589, 607, 608, 610, 611, 612, 616, 617, 620, 623, 635, 637, 640, 643, 653, 672, 673, 674, 675, 676, 677, 678, 679, 681, 682, 683, 684, 686, 687, 689, 692, 695, 830, 834, 841, 842, 843, 844, 850, 851, 852, 853, 854, 856, 857, 859, 866, 868, 871, 872, 876, 887, 888, 890, 892, 893, 894, 897, 900, 902, 907, 911, 912, 913, 914, 915, 916, 917, 918, 919, 920, 921, 922, 925, 945, 968, 1001, 1002, 1005, 1006, 1009, 1010, 1011, 1013, 1028, 1032, 1037, 1052, 1053, 1054, 1055, 1057, 1058, 1064, 1112, 1122, 1124, 1126, 1127, 1133, 1134, 1136, 1137, 1147, 1148, 1149, 1151, 1153, 1154, 1155, 1157, 1158, 1161, 1162, 1163, 1164, 1165, 1166, 1171, 1172, 1175, 1181, 1182, 1184, 1248, 1249, 1252, 1253, 1259, 1276, 1285, 1310, 1315, 1338, 1343, 1347, 1348, 1349, 1350, 1351, 1352, 1378, 1405, 1407, 1413, 1414, 1415, 1416, 1417, 1418, 1429, 1430, 1448, 1477, 1487, 1488, 1489, 1493, 1494, 1519, 1523, 1538, 1556, 1561, 1563, 1564, 1565, 1570, 1571, 1572, 1580, 1581, 1589, 1597, 1598, 1601, 1602, 1603, 1604, 1605, 1606, 1610, 1611, 1613, 1614, 1617, 1693, 1699, 1701, 1702, 1703, 1722, 1740, 1741, 1742, 1745, 1747, 1748, 1749, 1751, 1754, 1755, 1779, 1780, 1784, 1787, 1788, 1798, 1799, 1800, 1801, 1802, or 1803; and/or the antisense strand comprises the nucleoside sequence of any one of SEQ IDNOs: 1886, 1887, 1888, 1889, 1890, 1910, 1911, 1912, 1913, 1915, 1916, 1917, 1918, 1933, 1934, 1938, 1965, 1966, 1970, 1971, 1972, 1973, 1974, 1975, 1979, 1980, 1981, 1982, 1983, 2003, 2004, 2006, 2007, 2008, 2011, 2012, 2013, 2015, 2018, 2019, 2020, 2021, 2022, 2023, 2026, 2028, 2029, 2031, 2050, 2052, 2053, 2064, 2065, 2066, 2068, 2069, 2070, 2071, 2072, 2073, 2075, 2076, 2077, 2082, 2084, 2085, 2094, 2095, 2099, 2100, 2104, 2106, 2107, 2108, 2109, 2114, 2115, 2116, 2117, 2119, 2120, 2125, 2126, 2128, 2134, 2136, 2143, 2144, 2145, 2146, 2147, 2153, 2158, 2175, 2177, 2179, 2180, 2182, 2183, 2184, 2185, 2186, 2187, 2188, 2189, 2191, 2192, 2193, 2196, 2201, 2203, 2204, 2206, 2207, 2210, 2231, 2234, 2236, 2240, 2242, 2245, 2246, 2247, 2248, 2251, 2252, 2253, 2256, 2258, 2259, 2265, 2266, 2267, 2268, 2269, 2271, 2273, 2274, 2275, 2276, 2277, 2278, 2279, 2280, 2281, 2282, 2283, 2284, 2285, 2289, 2335, 2338, 2360, 2363, 2371, 2373, 2374, 2419, 2424, 2425, 2426, 2443, 2461, 2462, 2464, 2465, 2466, 2470, 2471, 2474, 2477, 2489, 2491, 2494, 2497, 2507, 2526, 2527, 2528, 2529, 2530, 2531, 2532, 2533, 2535, 2536, 2537, 2538, 2540, 2541, 2543, 2546, 2549, 2684, 2688, 2695, 2696, 2697, 2698, 2704, 2705, 2706, 2707, 2708, 2710, 2711, 2713, 2720, 2722, 2725, 2726, 2730, 2741, 2742, 2744, 2746, 2747, 2748, 2751, 2754, 2756, 2761, 2765, 2766, 2767, 2768, 2769, 2770, 2771, 2772, 2773, 2774, 2775, 2776, 2779, 2799, 2822, 2855, 2856, 2859, 2860, 2863, 2864, 2865, 2867, 2882, 2886, 2891, 2906, 2907, 2908, 2909, 2911, 2912, 2918, 2966, 2976, 2978, 2980, 2981, 2987, 2988, 2990, 2991, 3001, 3002, 3003, 3005, 3007, 3008, 3009, 3011, 3012, 3015, 3016, 3017, 3018, 3019, 3020, 3025, 3026, 3029, 3035, 3036, 3038, 3102, 3103, 3106, 3107, 3113, 3130, 3139, 3164, 3169, 3192, 3197, 3201, 3202, 3203, 3204, 3205, 3206, 3232, 3259, 3261, 3267, 3268, 3269, 3270, 3271, 3272, 3283, 3284, 3302, 3331, 3341, 3342, 3343, 3347, 3348, 3373, 3377, 3392, 3410, 3415, 3417, 3418, 3419, 3424, 3425, 3426, 3434, 3435, 3443, 3451, 3452, 3455, 3456, 3457, 3458, 3459, 3460, 3464, 3465, 3467, 3468, 3471, 3547, 3553, 3555, 3556, 3557, 3576, 3594, 3595, 3596, 3599, 3601, 3602, 3603, 3605, 3608, 3609, 3633, 3634, 3638, 3641, 3642, 3652, 3653, 3654, 3655, 3656, or 3657.

[0041] In some embodiments, the sense strand comprises the nucleoside sequence of any one of SEQ ID NOs: 32, 33, 34, 35, 36, 56, 57, 58, 59, 61, 62, 63, 64, 79, 80, 84, 111, 112, 116, 117, 118, 119, 120, 121, 125, 126, 127, 128, 129, 149, 150, 152, 153, 154, 157, 158, 159, 161, 164, 165, 166, 167, 168, 169, 172, 174, 175, 177, 196, 198, 199, 210, 211, 212, 214, 215, 216, 217, 218, 219, 221, 222, 223, 228, 230, 231, 240, 241, 245, 246, 250, 252, 253, 254, 255, 260, 261, 262, 263, 265, 266, 271, 272, 274, 280, 282, 289, 290, 291, 292, 293, 299, 304, 321, 323, 325, 326, 328, 329, 330, 331, 332, 333, 334, 335, 337, 338, 339, 342, 347, 349, 350, 352, 353, 356, 377, 380, 382, 386, 388, 391, 392, 393, 394, 397, 398, 399, 402, 404, 405, 411, 412, 413, 414, 415, 417, 419, 420, 421, 422, 423, 424, 425, 426, 427, 428, 429, 430, 431, 435, 481, 484, 506, 509, 517, 519, 520, 565, 570, 571, 572, 589, 607, 608, 610, 611, 612, 616, 617, 620, 623, 635, 637, 640, 643, 653, 672, 673, 674, 675, 676, 677, 678, 679, 681, 682, 683, 684, 686, 687, 689, 692, 695, 830, 834, 841, 842, 843, 844, 850, 851, 852, 853, 854, 856, 857, 859, 866, 868, 871, 872, 876, 887, 888, 890, 892, 893, 894, 897, 900, 902, 907, 911, 912, 913, 914, 915, 916, 917, 918, 919, 920, 921, 922, 925, 945, 968, 1001, 1002, 1005, 1006, 1009, 1010, 1011, 1013, 1028, 1032, 1037, 1052, 1053, 1054, 1055, 1057, 1058, 1064, 1112, 1122, 1124, 1126, 1127, 1133, 1134, 1136, 1137, 1147, 1148, 1149, 1151, 1153, 1154, 1155, 1157, 1158, 1161, 1162, 1163, 1164, 1165, 1166, 1171, 1172, 1175, 1181, 1182, 1184, 1248, 1249, 1252, 1253, 1259, 1276, 1285, 1310, 1315, 1338, 1343, 1347, 1348, 1349, 1350, 1351, 1352, 1378, 1405, 1407, 1413, 1414, 1415, 1416, 1417, 1418, 1429, 1430, 1448, 1477, 1487, 1488, 1489, 1493, 1494, 1519, 1523, 1538, 1556, 1561, 1563, 1564, 1565, 1570, 1571, 1572, 1580, 1581, 1589, 1597, 1598, 1601, 1602, 1603, 1604, 1605, 1606, 1610, 1611, 1613, 1614, 1617, 1693, 1699, 1701, 1702, 1703, 1722, 1740, 1741, 1742, 1745, 1747, 1748, 1749, 1751, 1754, 1755, 1779, 1780, 1784, 1787, 1788, 1798, 1799, 1800, 1801, 1802, or 1803, or a nucleic acid sequence thereof having 1 or 2 nucleoside additions at the 3′ end. In some embodiments, the antisense strand comprises the nucleoside sequence of any one of SEQ ID NOs: 1886, 1887, 1888, 1889, 1890, 1910, 1911, 1912, 1913, 1915, 1916, 1917, 1918, 1933, 1934, 1938, 1965, 1966, 1970, 1971, 1972, 1973, 1974, 1975, 1979, 1980, 1981, 1982, 1983, 2003, 2004, 2006, 2007, 2008, 2011, 2012, 2013, 2015, 2018, 2019, 2020, 2021, 2022, 2023, 2026, 2028, 2029, 2031, 2050, 2052, 2053, 2064, 2065, 2066, 2068, 2069, 2070, 2071, 2072, 2073, 2075, 2076, 2077, 2082, 2084, 2085, 2094, 2095, 2099, 2100, 2104, 2106, 2107, 2108, 2109, 2114, 2115, 2116, 2117, 2119, 2120, 2125, 2126, 2128, 2134, 2136, 2143, 2144, 2145, 2146, 2147, 2153, 2158, 2175, 2177, 2179, 2180, 2182, 2183, 2184, 2185, 2186, 2187, 2188, 2189, 2191, 2192, 2193, 2196, 2201, 2203, 2204, 2206, 2207, 2210, 2231, 2234, 2236, 2240, 2242, 2245, 2246, 2247, 2248, 2251, 2252, 2253, 2256, 2258, 2259, 2265, 2266, 2267, 2268, 2269, 2271, 2273, 2274, 2275, 2276, 2277, 2278, 2279, 2280, 2281, 2282, 2283, 2284, 2285, 2289, 2335, 2338, 2360, 2363, 2371, 2373, 2374, 2419, 2424, 2425, 2426, 2443, 2461, 2462, 2464, 2465, 2466, 2470, 2471, 2474, 2477, 2489, 2491, 2494, 2497, 2507, 2526, 2527, 2528, 2529, 2530, 2531, 2532, 2533, 2535, 2536, 2537, 2538, 2540, 2541, 2543, 2546, 2549, 2684, 2688, 2695, 2696, 2697, 2698, 2704, 2705, 2706, 2707, 2708, 2710, 2711, 2713, 2720, 2722, 2725, 2726, 2730, 2741, 2742, 2744, 2746, 2747, 2748, 2751, 2754, 2756, 2761, 2765, 2766, 2767, 2768, 2769, 2770, 2771, 2772, 2773, 2774, 2775, 2776, 2779, 2799, 2822, 2855, 2856, 2859, 2860, 2863, 2864, 2865, 2867, 2882, 2886, 2891, 2906, 2907, 2908, 2909, 2911, 2912, 2918, 2966, 2976, 2978, 2980, 2981, 2987, 2988, 2990, 2991, 3001, 3002, 3003, 3005, 3007, 3008, 3009, 3011, 3012, 3015, 3016, 3017, 3018, 3019, 3020, 3025, 3026, 3029, 3035, 3036, 3038, 3102, 3103, 3106, 3107, 3113, 3130, 3139, 3164, 3169, 3192, 3197, 3201, 3202, 3203, 3204, 3205, 3206, 3232, 3259, 3261, 3267, 3268, 3269, 3270, 3271, 3272, 3283, 3284, 3302, 3331, 3341, 3342, 3343, 3347, 3348, 3373, 3377, 3392, 3410, 3415, 3417, 3418, 3419, 3424, 3425, 3426, 3434, 3435, 3443, 3451, 3452, 3455, 3456, 3457, 3458, 3459, 3460, 3464, 3465, 3467, 3468, 3471, 3547, 3553, 3555, 3556, 3557, 3576, 3594, 3595, 3596, 3599, 3601, 3602, 3603, 3605, 3608, 3609, 3633, 3634, 3638, 3641, 3642, 3652, 3653, 3654, 3655, 3656, or 3657, or a nucleic acid sequence thereof having 1 or 2 nucleoside additions at the 3′ end. For example, the nucleic acid sequence may have 2 uracil nucleoside additions at the 3′ end. The nucleic acid sequence may have 1 uracil nucleoside addition at the 3′ end. The nucleic acid sequence may have more than 2 nucleoside additions at the 3′ end.

[0042] In some embodiments, the composition comprises an oligonucleotide that inhibits the expression of ANGPTL4, wherein the oligonucleotide comprises an siRNA comprising a sense strand and an antisense strand, wherein the sense strand comprises the nucleoside sequence of any one of SEQ ID NOs: 33, 34, 35, 36, 56, 121, 272, 280, 282, 289, 290, 291, 292, 293, 321, 323, 326, 328, 329, 330, 331, 332, 333, 334, 335, 337, 338, 339, 342, 347, 349, 411, 412, 430, 431, 435, 481, 484, 509, 517, 519, 520, 565, 620, 635, 637, 640, 830, 834, 841, 842, 843, 844, 850, 871, 872, 876, 887, 888, 894, 897, 902, 945, 1001, 1002, 1005, 1037, 1133, 1134, 1137, 1149, 1151, 1153, 1154, 1155, 1157, 1158, 1161, 1162, 1164, 1165, 1166, 1171, 1172, 1248, 1249, 1315, 1338, 1343, 1347, 1348, 1429, 1430, 1570, 1571, 1572, 1610, 1611, 1617, 1780, 1784, or 1787; and/or the antisense strand comprises the nucleoside sequence of any one of SEQ ID NOs: 1887, 1888, 1889, 1890, 1910, 1975, 2126, 2134, 2136, 2143, 2144, 2145, 2146, 2147, 2175, 2177, 2180, 2182, 2183, 2184, 2185, 2186, 2187, 2188, 2189, 2191, 2192, 2193, 2196, 2201, 2203, 2265, 2266, 2284, 2285, 2289, 2335, 2338, 2363, 2371, 2373, 2374, 2419, 2474, 2489, 2491, 2494, 2684, 2688, 2695, 2696, 2697, 2698, 2704, 2725, 2726, 2730, 2741, 2742, 2748, 2751, 2756, 2799, 2855, 2856, 2859, 2891, 2987, 2988, 2991, 3003, 3005, 3007, 3008, 3009, 3011, 3012, 3015, 3016, 3018, 3019, 3020, 3025, 3026, 3102, 3103, 3169, 3192, 3197, 3201, 3202, 3283, 3284, 3424, 3425, 3426, 3464, 3465, 3471, 3634, 3638, or 3641.

[0043] In some embodiments, the composition comprises an oligonucleotide that inhibits the expression of ANGPTL4, wherein the oligonucleotide comprises an siRNA comprising a sense strand and an antisense strand, wherein the sense strand comprises the nucleoside sequence of any one of SEQ ID NOs: 32, 33, 34, 35, 36, 56, 57, 58, 59, 61, 62, 63, 64, 79, 80, 112, 116, 117, 118, 119, 120, 125, 126, 127, 128, 129, 149, 150, 152, 153, 157, 158, 159, 161, 164, 165, 166, 167, 168, 169, 172, 174, 175, 196, 199,211, 212, 214, 215, 216, 217, 218, 219, 221, 222, 223, 228, 230, 231, 240, 241, 245, 246, 250, 252, 253, 254, 255, 260, 261, 262, 263, 265, 266, 271, 272, 274, 280, 289, 290, 291, 292, 293, 299, 304, 321, 323, 325, 326, 328, 329, 330, 331, 332, 333, 334, 335, 337, 338, 339, 342, 347, 349, 350, 352, 353, 356, 380, 382, 386, 388, 391, 392, 393, 394, 397, 398, 399, 402, 404, 405, 411, 412, 413, 414, 415, 420, 421, 422, 423, 424, 425, 426, 427, 428, 429, 430, 431, 435, 484, 517, 519, 520, 565, 570, 571, 572, 607, 608, 610, 611, 612, 616, 617, 620, 635, 637, 640, 672, 673, 674, 675, 676, 677, 678, 679, 681, 682, 683, 684, 686, 687, 689, 692, 695, 830, 841, 842, 843, 844, 850, 851, 852, 853, 854, 856, 857, 866, 868, 871, 872, 876, 887, 888, 890, 892, 893, 894, 902, 911, 912, 913, 914, 915, 916, 917, 918, 919, 920, 921, 922, 945, 1001, 1002, 1005, 1006, 1009, 1010, 1011, 1013, 1028, 1032, 1052, 1053, 1054, 1055, 1057, 1058, 1112, 1122, 1124, 1126, 1127, 1133, 1134, 1147, 1148, 1149, 1151, 1153, 1154, 1155, 1157, 1158, 1161, 1162, 1164, 1165, 1166, 1175, 1182, 1184, 1252, 1253, 1259, 1276, 1285, 1310, 1315, 1343, 1347, 1348, 1349, 1350, 1351, 1405, 1407, 1413, 1414, 1415, 1416, 1417, 1418, 1429, 1430, 1448, 1519, 1523, 1556, 1561, 1563, 1564, 1565, 1571, 1572, 1580, 1581, 1589, 1597, 1601, 1602, 1603, 1604, 1605, 1606, 1611, 1613, 1614, 1693, 1699, 1701, 1702, 1703, 1722, 1740, 1741, 1742, 1745, 1747, 1748, 1749, 1751, 1754, 1755, 1779, 1780, 1784, 1788, 1798, 1799, 1801, 1802, or 1803; and/or the antisense strand comprises the nucleoside sequence of any one of SEQ ID NOs: 1886, 1887, 1888, 1889, 1890, 1910, 1911, 1912, 1913, 1915, 1916, 1917, 1918, 1933, 1934, 1966, 1970, 1971, 1972, 1973, 1974, 1979, 1980, 1981, 1982, 1983, 2003, 2004, 2006, 2007, 2011, 2012, 2013, 2015, 2018, 2019, 2020, 2021, 2022, 2023, 2026, 2028, 2029, 2050, 2053, 2065, 2066, 2068, 2069, 2070, 2071, 2072, 2073, 2075, 2076, 2077, 2082, 2084, 2085, 2094, 2095, 2099, 2100, 2104, 2106, 2107, 2108, 2109, 2114, 2115, 2116, 2117, 2119, 2120, 2125, 2126, 2128, 2134, 2143, 2144, 2145, 2146, 2147, 2153, 2158, 2175, 2177, 2179, 2180, 2182, 2183, 2184, 2185, 2186, 2187, 2188, 2189, 2191, 2192, 2193, 2196, 2201, 2203, 2204, 2206, 2207, 2210, 2234, 2236, 2240, 2242, 2245, 2246, 2247, 2248, 2251, 2252, 2253, 2256, 2258, 2259, 2265, 2266, 2267, 2268, 2269, 2274, 2275, 2276, 2277, 2278, 2279, 2280, 2281, 2282, 2283, 2284, 2285, 2289, 2338, 2371, 2373, 2374, 2419, 2424, 2425, 2426, 2461, 2462, 2464, 2465, 2466, 2470, 2471, 2474, 2489, 2491, 2494, 2526, 2527, 2528, 2529, 2530, 2531, 2532, 2533, 2535, 2536, 2537, 2538, 2540, 2541, 2543, 2546, 2549, 2684, 2695, 2696, 2697, 2698, 2704, 2705, 2706, 2707, 2708, 2710, 2711, 2720, 2722, 2725, 2726, 2730, 2741, 2742, 2744, 2746, 2747, 2748, 2756, 2765, 2766, 2767, 2768, 2769, 2770, 2771, 2772, 2773, 2774, 2775, 2776, 2799, 2855, 2856, 2859, 2860, 2863, 2864, 2865, 2867, 2882, 2886, 2906, 2907, 2908, 2909, 2911, 2912, 2966, 2976, 2978, 2980, 2981, 2987, 2988, 3001, 3002, 3003, 3005, 3007, 3008, 3009, 3011, 3012, 3015, 3016, 3018, 3019, 3020, 3029, 3036, 3038, 3106, 3107, 3113, 3130, 3139, 3164, 3169, 3197, 3201, 3202, 3203, 3204, 3205, 3259, 3261, 3267, 3268, 3269, 3270, 3271, 3272, 3283, 3284, 3302, 3373, 3377, 3410, 3415, 3417, 3418, 3419, 3425, 3426, 3434, 3435, 3443, 3451, 3455, 3456, 3457, 3458, 3459, 3460, 3465, 3467, 3468, 3547, 3553, 3555, 3556, 3557, 3576, 3594, 3595, 3596, 3599, 3601, 3602, 3603, 3605, 3608, 3609, 3633, 3634, 3638, 3642, 3652, 3653, 3655, 3656, or 3657.

[0044] In some embodiments, the composition comprises an oligonucleotide that inhibits the expression of ANGPTL4, wherein the oligonucleotide comprises an siRNA comprising a sense strand and an antisense strand, wherein the sense strand comprises the nucleoside sequence of any one of SEQ ID NOs: 33, 34, 35, 36, 56, 272, 280, 289, 290, 291, 292, 293, 321, 323, 326, 328, 329, 330, 331, 332, 333, 334, 335, 337, 338, 339, 342, 347, 349, 411, 412, 430, 431, 435, 484, 517, 519, 520, 565, 620, 635, 637, 640, 830, 841, 842, 843, 844, 850, 871, 872, 876, 887, 888, 894, 902, 945, 1001, 1002, 1005, 1133, 1134, 1149, 1151, 1153, 1154, 1155, 1157, 1158, 1161, 1162, 1164, 1165, 1166, 1315, 1343, 1347, 1348, 1429, 1430, 1571, 1572, 1611, 1780, or 1784; and/or the antisense strand comprises the nucleoside sequence of any one of SEQ ID NOs: 1887, 1888, 1889, 1890, 1910, 2126, 2134, 2143, 2144, 2145, 2146, 2147, 2175, 2177, 2180, 2182, 2183, 2184, 2185, 2186, 2187, 2188, 2189, 2191, 2192, 2193, 2196, 2201, 2203, 2265, 2266, 2284, 2285, 2289, 2338, 2371, 2373, 2374, 2419, 2474, 2489, 2491, 2494, 2684, 2695, 2696, 2697, 2698, 2704, 2725, 2726, 2730, 2741, 2742, 2748, 2756, 2799, 2855, 2856, 2859, 2987, 2988, 3003, 3005, 3007, 3008, 3009, 3011, 3012, 3015, 3016, 3018, 3019, 3020, 3169, 3197, 3201, 3202, 3283, 3284, 3425, 3426, 3465, 3634, or 3638.

[0045] In some embodiments, the composition comprises an oligonucleotide that inhibits the expression of ANGPTL4, wherein the oligonucleotide comprises an siRNA comprising a sense strand and an antisense strand, wherein the sense strand comprises the nucleoside sequence of any one of SEQ ID NOs: 32, 36, 56, 57, 58, 61, 62, 79, 80, 117, 119, 125, 126, 128, 149, 152, 157, 158, 159, 161, 165, 166, 167, 168, 169, 174, 196, 211, 212, 217, 218, 219, 230, 231, 245, 246, 253, 260, 261, 262, 271, 272, 280, 289, 291, 292, 293, 304, 321, 323, 325, 326, 328, 330, 331, 332, 333, 334, 337, 338, 342, 347, 349, 352, 353, 356, 380, 382, 386, 388, 391, 392, 394, 399, 413, 414, 415, 422, 423, 424, 425, 426, 435, 517, 519, 520, 565, 571, 607, 608, 612, 617, 620, 635, 640, 672, 673, 674, 675, 678, 679, 681, 683, 684, 687, 692, 842, 843, 850, 851, 854, 866, 868, 876, 892, 893, 902, 911, 912, 913, 914, 916, 919, 945, 1001, 1002, 1006, 1010, 1028, 1052, 1053, 1054, 1055, 1057, 1112, 1124, 1127, 1147, 1149, 1151, 1153, 1155, 1157, 1164, 1175, 1182, 1184, 1259, 1276, 1285, 1315, 1343, 1349, 1350, 1351, 1405, 1407, 1413, 1415, 1418, 1564, 1571, 1581, 1589, 1597, 1601, 1602, 1603, 1604, 1605, 1606, 1613, 1614, 1693, 1701, 1722, 1740, 1745, 1751, 1755, 1801, 1802, or 1803, or 3638; and/or the antisense strand comprises the nucleoside sequence of any one of SEQ ID NOs: 1886, 1890, 1910, 1911, 1912, 1915, 1916, 1933, 1934, 1971, 1973, 1979, 1980, 1982, 2003, 2006, 2011, 2012, 2013, 2015, 2019, 2020, 2021, 2022, 2023, 2028, 2050, 2065, 2066, 2071, 2072, 2073, 2084, 2085, 2099, 2100, 2107, 2114, 2115, 2116, 2125, 2126, 2134, 2143, 2145, 2146, 2147, 2158, 2175, 2177, 2179, 2180, 2182, 2184, 2185, 2186, 2187, 2188, 2191, 2192, 2196, 2201, 2203, 2206, 2207, 2210, 2234, 2236, 2240, 2242, 2245, 2246, 2248, 2253, 2267, 2268, 2269, 2276, 2277, 2278, 2279, 2280, 2289, 2371, 2373, 2374, 2419, 2425, 2461, 2462, 2466, 2471, 2474, 2489, 2494, 2526, 2527, 2528, 2529, 2532, 2533, 2535, 2537, 2538, 2541, 2546, 2696, 2697, 2704, 2705, 2708, 2720, 2722, 2730, 2746, 2747, 2756, 2765, 2766, 2767, 2768, 2770, 2773, 2799, 2855, 2856, 2860, 2864, 2882, 2906, 2907, 2908, 2909, 2911, 2966, 2978, 2981, 3001, 3003, 3005, 3007, 3009, 3011, 3018, 3029, 3036, 3038, 3113, 3130, 3139, 3169, 3197, 3203, 3204, 3205, 3259, 3261, 3267, 3269, 3272, 3418, 3425, 3435, 3443, 3451, 3455, 3456, 3457, 3458, 3459, 3460, 3467, 3468, 3547, 3555, 3576, 3594, 3599, 3605, 3609, 3655, 3656, or 3657.

[0046] In some embodiments, the composition comprises an oligonucleotide that inhibits the expression of ANGPTL4, wherein the oligonucleotide comprises an siRNA comprising a sense strand and an antisense strand, the sense strand comprises the nucleoside sequence of any one of SEQ ID 36, 56, 272, 280, 289, 291, 292, 293, 321, 323, 326, 328, 330, 331, 332, 333, 334, 337, 338, 342, 347, 349, 435, 517, 519, 520, 565, 620, 635, 640, 842, 843, 850, 876, 902, 945, 1001, 1002, 1149, 1151, 1153, 1155, 1157, 1164, 1315, 1343, or 1571; and/or the antisense strand comprises the nucleoside sequence of any one of SEQ ID 1890, 1910, 2126, 2134, 2143, 2145, 2146, 2147, 2175, 2177, 2180, 2182, 2184, 2185, 2186, 2187, 2188, 2191, 2192, 2196, 2201, 2203, 2289, 2371, 2373, 2374, 2419, 2474, 2489, 2494, 2696, 2697, 2704, 2730, 2756, 2799, 2855, 2856, 3003, 3005, 3007, 3009, 3011, 3018, 3169, 3197, or 3425.

[0047] In some embodiments, the composition comprises an oligonucleotide that inhibits the expression of ANGPTL4, wherein the oligonucleotide comprises an siRNA comprising a sense strand and an antisense strand, wherein the sense strand comprises the nucleoside sequence of any one of SEQ ID NOs: 32, 36, 56, 58, 61, 62, 80, 117, 119, 126, 152, 154, 157, 158, 159, 161, 166, 169, 174, 177, 196, 211, 212, 217, 218, 230, 231, 245, 253, 260, 261, 271, 272, 280, 289, 293, 304, 328, 330, 331, 332, 333, 334, 337, 342, 347, 349, 353, 356, 386, 388, 391, 392, 394, 414, 415, 422, 423, 424, 426, 435, 520, 571, 608, 612, 617, 653, 672, 678, 679, 681, 683, 692, 842, 843, 851, 854, 859, 876, 892, 900, 913, 914, 919, 968, 1001, 1002, 1054, 1057, 1064, 1112, 1124, 1157, 1164, 1182, 1184, 1248, 1259, 1343, 1351, 1352, 1415, 1418, 1564, 1581, 1602, 1614, 1693, 1701, 1722, 1740, 1751, 1755, or 1787; and/orthe antisense strand comprises the nucleoside sequence of any one of SEQ ID NOs: 1886, 1890, 1910, 1912, 1915, 1916, 1934, 1971, 1973, 1980, 2006, 2008, 2011, 2012, 2013, 2015, 2020, 2023, 2028, 2031, 2050, 2065, 2066, 2071, 2072, 2084, 2085, 2099, 2107, 2114, 2115, 2125, 2126, 2134, 2143, 2147, 2158, 2182, 2184, 2185, 2186, 2187, 2188, 2191, 2196, 2201, 2203, 2207, 2210, 2240, 2242, 2245, 2246, 2248, 2268, 2269, 2276, 2277, 2278, 2280, 2289, 2374, 2425, 2462, 2466, 2471, 2507, 2526, 2532, 2533, 2535, 2537, 2546, 2696, 2697, 2705, 2708, 2713, 2730, 2746, 2754, 2767, 2768, 2773, 2822, 2855, 2856, 2908, 2911, 2918, 2966, 2978, 3011, 3018, 3036, 3038, 3102, 3113, 3197, 3205, 3206, 3269, 3272, 3418, 3435, 3456, 3468, 3547, 3555, 3576, 3594, 3605, 3609, or 3641.

[0048] In some embodiments, the composition comprises an oligonucleotide that inhibits the expression of ANGPTL4, wherein the oligonucleotide comprises an siRNA comprising a sense strand and an antisense strand, wherein the sense strand comprises the nucleoside sequence of any one of SEQ ID NOs: 36, 56, 272, 280, 289, 293, 328, 330, 331, 332, 333, 334, 337, 342, 347, 349, 435, 520, 842, 843, 876, 1001, 1002, 1157, 1164, or 1343; and/or the antisense strand comprises the nucleoside sequence of any one of SEQ ID NOs: 1890, 1910, 2126, 2134, 2143, 2147, 2182, 2184, 2185, 2186, 2187, 2188, 2191, 2196, 2201, 2203, 2289, 2374, 2696, 2697, 2730, 2855, 2856, 3011, 3018, or 3197.

[0049] In some embodiments, the siRNA comprises the sense strand and/or the antisense strand sequence of an siRNA of subset A, or a nucleic acid sequence thereof having 3 or 4 nucleoside substitutions, additions, or deletions. In some embodiments, the siRNA comprises the sense strand and/or the antisense strand sequence of an siRNA of subset A, or a nucleic acid sequence thereof having 1 or 2 nucleoside substitutions, additions, or deletions. In some embodiments, the siRNA comprises the sense strand and/or the antisense strand sequence of an siRNA of subset A. In some embodiments, the siRNA is cross-reactive with a non-human primate (NHP) ANGPTL4 mRNA. The siRNA may include one or more internucleoside linkages and/or one or more nucleoside modifications.

[0050] In some embodiments, the siRNA comprises the sense strand and/or the antisense strand sequence of an siRNA in Table 4, or a nucleic acid sequence thereof having 3 or 4 nucleoside substitutions, additions, or deletions. In some embodiments, the siRNA comprises the sense strand and/or the antisense strand sequence of an siRNA in Table 4, or a nucleic acid sequence thereof having 1 or 2 nucleoside substitutions, additions, or deletions. In some embodiments, the siRNA comprises the sense strand and/or the antisense strand sequence of an siRNA in Table 4. In some embodiments, the siRNA is cross-reactive with a non-human primate (NHP) ANGPTL4 mRNA. The siRNA may include one or more internucleoside linkages and/or one or more nucleoside modifications.

[0051] In some embodiments, the siRNA comprises the sense strand and/or the antisense strand sequence of an siRNA of subset B, or a nucleic acid sequence thereof having 3 or 4 nucleoside substitutions, additions, or deletions. In some embodiments, the siRNA comprises the sense strand and/or the antisense strand sequence of an siRNA of subset B, or a nucleic acid sequence thereof having 1 or 2 nucleoside substitutions, additions, or deletions. In some embodiments, the siRNA comprises the sense strand and/or the antisense strand sequence of an siRNA of subset B. In some embodiments, the siRNA is cross-reactive with a non-human primate (NHP) ANGPTL4 mRNA. The siRNA may include one or more internucleoside linkages and/or one or more nucleoside modifications.

[0052] In some embodiments, the siRNA comprises the sense strand and/or the antisense strand sequence of an siRNA of subset C, or a nucleic acid sequence thereof having 3 or 4 nucleoside substitutions, additions, or deletions. In some embodiments, the siRNA comprises the sense strand and/or the antisense strand sequence of an siRNA of subset C, or a nucleic acid sequence thereof having 1 or 2 nucleoside substitutions, additions, or deletions. In some embodiments, the siRNA comprises the sense strand and/or the antisense strand sequence of an siRNA of subset C. In some embodiments, the siRNA is cross-reactive with a non-human primate (NHP) ANGPTL4 mRNA. The siRNA may include one or more internucleoside linkages and/or one or more nucleoside modifications.

[0053] In some embodiments, the siRNA comprises the sense strand and/or the antisense strand sequence of an siRNA of subset D, or a nucleic acid sequence thereof having 3 or 4 nucleoside substitutions, additions, or deletions. In some embodiments, the siRNA comprises the sense strand and/or the antisense strand sequence of an siRNA of subset D, or a nucleic acid sequence thereof having 1 or 2 nucleoside substitutions, additions, or deletions. In some embodiments, the siRNA comprises the sense strand and/or the antisense strand sequence of an siRNA of subset D. In some embodiments, the siRNA is cross-reactive with a non-human primate (NHP) ANGPTL4 mRNA. The siRNA may include one or more internucleoside linkages and/or one or more nucleoside modifications.

[0054] In some embodiments, the siRNA comprises the sense strand and/or the antisense strand sequence of an siRNA of subset E, or a nucleic acid sequence thereof having 3 or 4 nucleoside substitutions, additions, or deletions. In some embodiments, the siRNA comprises the sense strand and/or the antisense strand sequence of an siRNA of subset E, or a nucleic acid sequence thereof having 1 or 2 nucleoside substitutions, additions, or deletions. In some embodiments, the siRNA comprises the sense strand and/or the antisense strand sequence of an siRNA of subset E. In some embodiments, the siRNA is cross-reactive with a non-human primate (NHP) ANGPTL4 mRNA. The siRNA may include one or more internucleoside linkages and/or one or more nucleoside modifications.

[0055] In some embodiments, the siRNA comprises the sense strand and/or the antisense strand sequence of an siRNA of subset F, or a nucleic acid sequence thereof having 3 or 4 nucleoside substitutions, additions, or deletions. In some embodiments, the siRNA comprises the sense strand and/or the antisense strand sequence of an siRNA of subset F, or a nucleic acid sequence thereof having 1 or 2 nucleoside substitutions, additions, or deletions. In some embodiments, the siRNA comprises the sense strand and/or the antisense strand sequence of an siRNA of subset F. In some embodiments, the siRNA is cross-reactive with a non-human primate (NHP) ANGPTL4 mRNA. The siRNA may include one or more internucleoside linkages and/or one or more nucleoside modifications.

[0056] In some embodiments, the siRNA comprises the sense strand and/or the antisense strand sequence of an siRNA of subset G, or a nucleic acid sequence thereof having 3 or 4 nucleoside substitutions, additions, or deletions. In some embodiments, the siRNA comprises the sense strand and/or the antisense strand sequence of an siRNA of subset G, or a nucleic acid sequence thereof having 1 or 2 nucleoside substitutions, additions, or deletions. In some embodiments, the siRNA comprises the sense strand and/or the antisense strand sequence of an siRNA of subset G. In some embodiments, the siRNA is cross-reactive with a non-human primate (NHP) ANGPTL4 mRNA. The siRNA may include one or more internucleoside linkages and/or one or more nucleoside modifications.

[0057] In some embodiments, the siRNA comprises the sense strand and/or the antisense strand sequence of an siRNA in Table 5, or a nucleic acid sequence thereof having 3 or 4 nucleoside substitutions, additions, or deletions. In some embodiments, the siRNA comprises the sense strand and/or the antisense strand sequence of an siRNA in Table 5, or a nucleic acid sequence thereof having 1 or 2 nucleoside substitutions, additions, or deletions. In some embodiments, the siRNA comprises the sense strand and/or the antisense strand sequence of an siRNA in Table 5. In some embodiments, the siRNA comprises one or more of the internucleoside linkages and/or nucleoside modifications of the siRNA in Table 5. In some embodiments, the siRNA comprises the internucleoside linkages and/or nucleoside modifications of the siRNA in Table 5. In some embodiments, the siRNA is unmodified. In some embodiments, the sense strand sequence of an siRNA in Table 5 comprises modification pattern 1S. In some embodiments, the sense strand sequence of an siRNA in Table 5 comprises modification pattern 3S or 6S. In some embodiments, the sense strand sequence of an siRNA in Table 5 comprises modification pattern 1AS. In some embodiments, the sense or antisense strand sequence of an siRNA in Table 5 comprises modification pattern 4AS, 5AS, 7AS, or 8AS. In some embodiments, the sense strand sequence of an siRNA in Table 5 comprises modification pattern 7S, 8S, or 9S. In some embodiments, the antisense strand sequence of an siRNA in Table 5 comprises modification pattern 10AS or 11AS.

[0058] In some embodiments, the siRNA reduces an ANGPTL4 mRNA measurement by 10% or more, 20% or more, 30% or more, 40% or more, 50% or more, 60% or more, 70% or more, 80% or more, or 90% or more, relative to a control. In some embodiments, the siRNA reduces an ANGPTL4 mRNA measurement by 10% or less, 20% or less, 30% or less, 40% or less, 50% or less, 60% or less, 70% or less, 80% or less, or 90% or less, relative to a control. In some embodiments, the reduction is in a cell line such as U-138 MG cells. In some embodiments, the reduction is in response to 1 nM of the siRNA. In some embodiments, the reduction is in response to 10 nM of the siRNA.

[0059] Some siRNAs in Table 5 reduced an ANGPTL4 mRNA measurement by 10% or more, relative to a control. In some embodiments, the siRNA comprises the sense strand and/or the antisense strand sequence of ETD00646, ETD00648, ETD00649, ETD00651, ETD00653, ETD00654, ETD00655, ETD00656, ETD00658, ETD00660, ETD00661, ETD00662, ETD00667, ETD00669, ETD00683, ETD00684, ETD00686, ETD00688, ETD00689, ETD00691, ETD00692, ETD00694, ETD00702, ETD00709, ETD00713, ETD00714, ETD00715, ETD00716, ETD00717, ETD00719, ETD00721, ETD00726, ETD00727, ETD00728, ETD00729, ETD00730, ETD00731, ETD00733, ETD00736, ETD00738, or ETD00743, or a nucleic acid sequence thereof having 3 or 4 nucleoside substitutions, additions, or deletions. In some embodiments, the siRNA comprises the sense strand and/or the antisense strand sequence of ETD00646, ETD00648, ETD00649, ETD00651, ETD00653, ETD00654, ETD00655, ETD00656, ETD00658, ETD00660, ETD00661, ETD00662, ETD00667, ETD00669, ETD00683, ETD00684, ETD00686, ETD00688, ETD00689, ETD00691, ETD00692, ETD00694, ETD00702, ETD00709, ETD00713, ETD00714, ETD00715, ETD00716, ETD00717, ETD00719, ETD00721, ETD00726, ETD00727, ETD00728, ETD00729, ETD00730, ETD00731, ETD00733, ETD00736, ETD00738, or ETD00743, or a nucleic acid sequence thereof having 1 or 2 nucleoside substitutions, additions, or deletions. In some embodiments, the siRNA comprises the sense strand and/or the antisense strand sequence of ETD00646, ETD00648, ETD00649, ETD00651, ETD00653, ETD00654, ETD00655, ETD00656, ETD00658, ETD00660, ETD00661, ETD00662, ETD00667, ETD00669, ETD00683, ETD00684, ETD00686, ETD00688, ETD00689, ETD00691, ETD00692, ETD00694, ETD00702, ETD00709, ETD00713, ETD00714, ETD00715, ETD00716, ETD00717, ETD00719, ETD00721, ETD00726, ETD00727, ETD00728, ETD00729, ETD00730, ETD00731, ETD00733, ETD00736, ETD00738, or ETD00743. In some embodiments, the siRNA comprises one or more of the internucleoside linkages and/or nucleoside modifications of ETD00646, ETD00648, ETD00649, ETD00651, ETD00653, ETD00654, ETD00655, ETD00656, ETD00658, ETD00660, ETD00661, ETD00662, ETD00667, ETD00669, ETD00683, ETD00684, ETD00686, ETD00688, ETD00689, ETD00691, ETD00692, ETD00694, ETD00702, ETD00709, ETD00713, ETD00714, ETD00715, ETD00716, ETD00717, ETD00719, ETD00721, ETD00726, ETD00727, ETD00728, ETD00729, ETD00730, ETD00731, ETD00733, ETD00736, ETD00738, or ETD00743. In some embodiments, the siRNA comprises the internucleoside linkages and/or nucleoside modifications of ETD00646, ETD00648, ETD00649, ETD00651, ETD00653, ETD00654, ETD00655, ETD00656, ETD00658, ETD00660, ETD00661, ETD00662, ETD00667, ETD00669, ETD00683, ETD00684, ETD00686, ETD00688, ETD00689, ETD00691, ETD00692, ETD00694, ETD00702, ETD00709, ETD00713, ETD00714, ETD00715, ETD00716, ETD00717, ETD00719, ETD00721, ETD00726, ETD00727, ETD00728, ETD00729, ETD00730, ETD00731, ETD00733, ETD00736, ETD00738, or ETD00743. In some embodiments, the siRNA is unmodified.

[0060] The siRNA may comprise an unmodified version of a sense strand sequence of an siRNA listed in Table 5. In some embodiments, the siRNA of listed in Table 5 comprises any sense strand sequence of a subset A siRNA that is cross-reactive with a NHP ANGPTL4 mRNA. The siRNA may comprise an unmodified version of an antisense strand sequence of an siRNA listed in Table 5. In some embodiments, the siRNA of listed in Table 5 comprises any antisense strand sequence of a subset A siRNA that is cross-reactive with a NHP ANGPTL4 mRNA.

[0061] In some embodiments, the siRNA comprises the sense strand and/or the antisense strand sequence of an siRNA in Table 6, or a nucleic acid sequence thereof having 3 or 4 nucleoside substitutions, additions, or deletions. In some embodiments, the siRNA comprises the sense strand and/or the antisense strand sequence of an siRNA in Table 6, or a nucleic acid sequence thereof having 1 or 2 nucleoside substitutions, additions, or deletions. In some embodiments, the siRNA comprises the sense strand and/or the antisense strand sequence of an siRNA in Table 6. In some embodiments, the siRNA comprises one or more of the internucleoside linkages and/or nucleoside modifications of the siRNA in Table 6. In some embodiments, the siRNA comprises the internucleoside linkages and/or nucleoside modifications of the siRNA in Table 6. In some embodiments, the siRNA is unmodified.

[0062] The siRNA may comprise an unmodified version of an antisense strand sequence of an siRNA listed in Table 6. In some embodiments, the siRNA comprises the sense strand sequence of SEQ ID NO: 32, 570, 571, 572, 589, 607, 759, 801, 1276, 1285, 1489, 1490, 1564, 1580, 1581, 1589, 1597, 1702, 1840, or 1842, or a nucleic acid sequence thereof having 3 or 4 nucleoside substitutions, additions, or deletions. In some embodiments, the siRNA comprises the sense strand sequence of SEQ ID NO: 32, 570, 571, 572, 589, 607, 759, 801, 1276, 1285, 1489, 1490, 1564, 1580, 1581, 1589, 1597, 1702, 1840, or 1842, or a nucleic acid sequence thereof having 1 or 2 nucleoside substitutions, additions, or deletions. In some embodiments, the siRNA comprises the sense strand sequence of SEQ ID NO: 32, 570, 571, 572, 589, 607, 759, 801, 1276, 1285, 1489, 1490, 1564, 1580, 1581, 1589, 1597, 1702, 1840, or 1842. The siRNA may include the sense strand sequence of SEQ ID NO: 32, 570, 571, 572, 589, 607, 759, 801, 1276, 1285, 1489, 1490, 1564, 1580, 1581, 1589, 1597, 1702, 1840, or 1842, and one or more internucleoside linkages and/or one or more nucleoside modifications. The siRNA may include the sense strand sequence of SEQ ID NO: 32, 570, 571, 572, 589, 607, 759, 801, 1276, 1285, 1489, 1490, 1564, 1580, 1581, 1589, 1597, 1702, 1840, or 1842, and a modification pattern described herein. For example, any of the sense strands comprising the sequence of SEQ ID NO: 32, 570, 571, 572, 589, 607, 759, 801, 1276, 1285, 1489, 1490, 1564, 1580, 1581, 1589, 1597, 1702, 1840, or 1842 may in some cases comprise modification pattern 1S, 2S, 3S, or 6S, or modification pattern 7S, 8S, or 9S.

[0063] The siRNA may comprise an unmodified version of an antisense strand sequence of an siRNA listed in Table 6. In some embodiments, the siRNA comprises the antisense strand sequence of SEQ ID NO: 1886, 2424, 2425, 2426, 2443, 2461, 2613, 2655, 3130, 3139, 3343, 3344, 3418, 3434, 3435, 3443, 3451, 3556, 3694, or 3696, or a nucleic acid sequence thereof having 3 or 4 nucleoside substitutions, additions, or deletions. In some embodiments, the siRNA comprises the antisense strand sequence of SEQ ID NO: 1886, 2424, 2425, 2426, 2443, 2461, 2613, 2655, 3130, 3139, 3343, 3344, 3418, 3434, 3435, 3443, 3451, 3556, 3694, or 3696, or a nucleic acid sequence thereof having 1 or 2 nucleoside substitutions, additions, or deletions. In some embodiments, the siRNA comprises the antisense strand sequence of SEQ ID NO: 1886, 2424, 2425, 2426, 2443, 2461, 2613, 2655, 3130, 3139, 3343, 3344, 3418, 3434, 3435, 3443, 3451, 3556, 3694, or 3696. The siRNA may include the antisense strand sequence of SEQ ID NO: 1886, 2424, 2425, 2426, 2443, 2461, 2613, 2655, 3130, 3139, 3343, 3344, 3418, 3434, 3435, 3443, 3451, 3556, 3694, or 3696, and one or more internucleoside linkages and/or one or more nucleoside modifications. The siRNA may include the antisense strand sequence of SEQ ID NO: 1886, 2424, 2425, 2426, 2443, 2461, 2613, 2655, 3130, 3139, 3343, 3344, 3418, 3434, 3435, 3443, 3451, 3556, 3694, or 3696, and a modification pattern described herein. For example, any of the antisense strands comprising the sequence of SEQ ID NO: 1886, 2424, 2425, 2426, 2443, 2461, 2613, 2655, 3130, 3139, 3343, 3344, 3418, 3434, 3435, 3443, 3451, 3556, 3694, or 3696 may comprise modification pattern 1AS, 3AS, 4AS, 5AS, 7AS, or 8AS, or modification pattern 10AS or 11AS.

[0064] Some siRNAs in Table 6 reduced an ANGPTL4 mRNA measurement by 10% or more, relative to a control. In some embodiments, the siRNA comprises the sense strand and/or the antisense strand sequence of ETD00915, ETD00916, ETD00917, ETD00921, ETD00924, ETD00925, ETD00926, ETD00927, ETD00928, ETD00929, ETD00930, ETD00931, ETD00932, ETD00933, or ETD00934, or a nucleic acid sequence thereof having 3 or 4 nucleoside substitutions, additions, or deletions. In some embodiments, the siRNA comprises the sense strand and/or the antisense strand sequence of ETD00915, ETD00916, ETD00917, ETD00921, ETD00924, ETD00925, ETD00926, ETD00927, ETD00928, ETD00929, ETD00930, ETD00931, ETD00932, ETD00933, or ETD00934, or a nucleic acid sequence thereof having 1 or 2 nucleoside substitutions, additions, or deletions. In some embodiments, the siRNA comprises the sense strand and/or the antisense strand sequence of ETD00915, ETD00916, ETD00917, ETD00921, ETD00924, ETD00925, ETD00926, ETD00927, ETD00928, ETD00929, ETD00930, ETD00931, ETD00932, ETD00933, or ETD00934. In some embodiments, the siRNA comprises one or more of the internucleoside linkages and/or nucleoside modifications of ETD00915, ETD00916, ETD00917, ETD00921, ETD00924, ETD00925, ETD00926, ETD00927, ETD00928, ETD00929, ETD00930, ETD00931, ETD00932, ETD00933, or ETD00934. In some embodiments, the siRNA comprises the internucleoside linkages and/or nucleoside modifications of ETD00915, ETD00916, ETD00917, ETD00921, ETD00924, ETD00925, ETD00926, ETD00927, ETD00928, ETD00929, ETD00930, ETD00931, ETD00932, ETD00933, or ETD00934. In some embodiments, the siRNA is unmodified.

[0065] The siRNA may comprise a sense strand sequence of an siRNA that reduced an ANGPTL4 mRNA measurement by 10% or more, relative to a control, in Table 5 or Table 6. In some embodiments, the siRNA comprises the sense strand sequence of any one of SEQ ID NOS: 14012, 14014, 14015, 14017, 14019, 14020, 14021, 14022, 14024, 14026, 14027, 14028, 14033, 14035, 14049, 14050, 14052, 14054, 14055, 14057, 14058, 14060, 14068, 14075, 14079, 14080, 14081, 14082, 14083, 14085, 14087, 14092, 14093, 14094, 14095, 14096, 14097, 14099, 14102, 14104, 14109, 14114, 14115, 14116, 14120, 14123, 14124, 14125, 14126, 14127, 14128, 14129, 14130, 14131, 14132, or 14133, or a nucleic acid sequence thereof having 3 or 4 nucleoside substitutions, additions, or deletions. In some embodiments, the siRNA comprises the sense strand sequence of any one of SEQ ID NOS: 14012, 14014, 14015, 14017, 14019, 14020, 14021, 14022, 14024, 14026, 14027, 14028, 14033, 14035, 14049, 14050, 14052, 14054, 14055, 14057, 14058, 14060, 14068, 14075, 14079, 14080, 14081, 14082, 14083, 14085, 14087, 14092, 14093, 14094, 14095, 14096, 14097, 14099, 14102, 14104, 14109, 14114, 14115, 14116, 14120, 14123, 14124, 14125, 14126, 14127, 14128, 14129, 14130, 14131, 14132, or 14133, or a nucleic acid sequence thereof having 1 or 2 nucleoside substitutions, additions, or deletions. In some embodiments, the siRNA comprises the sense strand sequence of any one of SEQ ID NOS: 14012, 14014, 14015, 14017, 14019, 14020, 14021, 14022, 14024, 14026, 14027, 14028, 14033, 14035, 14049, 14050, 14052, 14054, 14055, 14057, 14058, 14060, 14068, 14075, 14079, 14080, 14081, 14082, 14083, 14085, 14087, 14092, 14093, 14094, 14095, 14096, 14097, 14099, 14102, 14104, 14109, 14114, 14115, 14116, 14120, 14123, 14124, 14125, 14126, 14127, 14128, 14129, 14130, 14131, 14132, or 14133. In some embodiments, the siRNA comprises one or more of the internucleoside linkages and/or nucleoside modifications of the sense strand of 14012, 14014, 14015, 14017, 14019, 14020, 14021, 14022, 14024, 14026, 14027, 14028, 14033, 14035, 14049, 14050, 14052, 14054, 14055, 14057, 14058, 14060, 14068, 14075, 14079, 14080, 14081, 14082, 14083, 14085, 14087, 14092, 14093, 14094, 14095, 14096, 14097, 14099, 14102, 14104, 14109, 14114, 14115, 14116, 14120, 14123, 14124, 14125, 14126, 14127, 14128, 14129, 14130, 14131, 14132, or 14133. In some embodiments, the siRNA comprises the internucleoside linkages and/or nucleoside modifications of the sense strand of 14012, 14014, 14015, 14017, 14019, 14020, 14021, 14022, 14024, 14026, 14027, 14028, 14033, 14035, 14049, 14050, 14052, 14054, 14055, 14057, 14058, 14060, 14068, 14075, 14079, 14080, 14081, 14082, 14083, 14085, 14087, 14092, 14093, 14094, 14095, 14096, 14097, 14099, 14102, 14104, 14109, 14114, 14115, 14116, 14120, 14123, 14124, 14125, 14126, 14127, 14128, 14129, 14130, 14131, 14132, or 14133. In some embodiments, the siRNA is unmodified.

[0066] The siRNA may comprise an antisense strand sequence of an siRNA that reduced an ANGPTL4 mRNA measurement by 10% or more, relative to a control, in Table 5 or Table 6. In some embodiments, the siRNA comprises the antisense strand sequence of any one of SEQ ID NOS: 14167, 14169, 14170, 14172, 14174, 14175, 14176, 14177, 14179, 14181, 14182, 14183, 14188, 14190, 14204, 14205, 14207, 14209, 14210, 14212, 14213, 14215, 14223, 14230, 14234, 14235, 14236, 14237, 14238, 14240, 14242, 14247, 14248, 14249, 14250, 14251, 14252, 14254, 14257, 14259, 14264, 14269, 14270, 14271, 14275, 14278, 14279, 14280, 14281, 14282, 14283, 14284, 14285, 14286, 14287, or 14288, or a nucleic acid sequence thereof having 3 or 4 nucleoside substitutions, additions, or deletions. In some embodiments, the siRNA comprises the antisense strand sequence of any one of SEQ ID NOS: 14167, 14169, 14170, 14172, 14174, 14175, 14176, 14177, 14179, 14181, 14182, 14183, 14188, 14190, 14204, 14205, 14207, 14209, 14210, 14212, 14213, 14215, 14223, 14230, 14234, 14235, 14236, 14237, 14238, 14240, 14242, 14247, 14248, 14249, 14250, 14251, 14252, 14254, 14257, 14259, 14264, 14269, 14270, 14271, 14275, 14278, 14279, 14280, 14281, 14282, 14283, 14284, 14285, 14286, 14287, or 14288, or a nucleic acid sequence thereof having 1 or 2 nucleoside substitutions, additions, or deletions. In some embodiments, the siRNA comprises the antisense strand sequence of any one of SEQ ID NOS: 14167, 14169, 14170, 14172, 14174, 14175, 14176, 14177, 14179, 14181, 14182, 14183, 14188, 14190, 14204, 14205, 14207, 14209, 14210, 14212, 14213, 14215, 14223, 14230, 14234, 14235, 14236, 14237, 14238, 14240, 14242, 14247, 14248, 14249, 14250, 14251, 14252, 14254, 14257, 14259, 14264, 14269, 14270, 14271, 14275, 14278, 14279, 14280, 14281, 14282, 14283, 14284, 14285, 14286, 14287, or 14288. In some embodiments, the siRNA comprises one or more of the internucleoside linkages and/or nucleoside modifications of the antisense strand of 14167, 14169, 14170, 14172, 14174, 14175, 14176, 14177, 14179, 14181, 14182, 14183, 14188, 14190, 14204, 14205, 14207, 14209, 14210, 14212, 14213, 14215, 14223, 14230, 14234, 14235, 14236, 14237, 14238, 14240, 14242, 14247, 14248, 14249, 14250, 14251, 14252, 14254, 14257, 14259, 14264, 14269, 14270, 14271, 14275, 14278, 14279, 14280, 14281, 14282, 14283, 14284, 14285, 14286, 14287, or 14288. In some embodiments, the siRNA comprises the internucleoside linkages and/or nucleoside modifications of the antisense strand of 14167, 14169, 14170, 14172, 14174, 14175, 14176, 14177, 14179, 14181, 14182, 14183, 14188, 14190, 14204, 14205, 14207, 14209, 14210, 14212, 14213, 14215, 14223, 14230, 14234, 14235, 14236, 14237, 14238, 14240, 14242, 14247, 14248, 14249, 14250, 14251, 14252, 14254, 14257, 14259, 14264, 14269, 14270, 14271, 14275, 14278, 14279, 14280, 14281, 14282, 14283, 14284, 14285, 14286, 14287, or 14288. In some embodiments, the siRNA is unmodified.

[0067] The siRNA may comprise an unmodified version of a sense strand sequence of an siRNA that reduced an ANGPTL4 mRNA measurement by 10% or more, relative to a control, in Table 5 or Table 6. In some embodiments, the siRNA comprises the sense strand sequence of any one of SEQ ID NOS: 32, 33, 35, 36, 121, 280, 282, 289, 290, 292, 321, 323, 326, 332, 334, 484, 509, 519, 565, 570, 571, 620, 637, 640, 759, 834, 876, 1001, 1133, 1134, 1137, 1149, 1151, 1154, 1157, 1165, 1166, 1171, 1172, 1248, 1249, 1285, 1338, 1348, 1430, 1489, 1490, 1564, 1580, 1581, 1589, 1597, 1611, 1702, 1840, or 1842, or a nucleic acid sequence thereof having 3 or 4 nucleoside substitutions, additions, or deletions. In some embodiments, the siRNA comprises the sense strand sequence of any one of SEQ ID NOS: 32, 33, 35, 36, 121, 280, 282, 289, 290, 292, 321, 323, 326, 332, 334, 484, 509, 519, 565, 570, 571, 620, 637, 640, 759, 834, 876, 1001, 1133, 1134, 1137, 1149, 1151, 1154, 1157, 1165, 1166, 1171, 1172, 1248, 1249, 1285, 1338, 1348, 1430, 1489, 1490, 1564, 1580, 1581, 1589, 1597, 1611, 1702, 1840, or 1842, ora nucleic acid sequence thereof having 1 or 2 nucleoside substitutions, additions, or deletions. In some embodiments, the siRNA comprises the sense strand sequence of any one of SEQ ID NOS: 32, 33, 35, 36, 121, 280, 282, 289, 290, 292, 321, 323, 326, 332, 334, 484, 509, 519, 565, 570, 571, 620, 637, 640, 759, 834, 876, 1001, 1133, 1134, 1137, 1149, 1151, 1154, 1157, 1165, 1166, 1171, 1172, 1248, 1249, 1285, 1338, 1348, 1430, 1489, 1490, 1564, 1580, 1581, 1589, 1597, 1611, 1702, 1840, or 1842. The siRNA may include the sense strand sequence of any one of SEQ ID NOS: 32, 33, 35, 36, 121, 280, 282, 289, 290, 292, 321, 323, 326, 332, 334, 484, 509, 519, 565, 570, 571, 620, 637, 640, 759, 834, 876, 1001, 1133, 1134, 1137, 1149, 1151, 1154, 1157, 1165, 1166, 1171, 1172, 1248, 1249, 1285, 1338, 1348, 1430, 1489, 1490, 1564, 1580, 1581, 1589, 1597, 1611, 1702, 1840, or 1842, and one or more internucleoside linkages and/or one or more nucleoside modifications. The siRNA may include the sense strand sequence of any one of SEQ ID NOS: 32, 33, 35, 36, 121, 280, 282, 289, 290, 292, 321, 323, 326, 332, 334, 484, 509, 519, 565, 570, 571, 620, 637, 640, 759, 834, 876, 1001, 1133, 1134, 1137, 1149, 1151, 1154, 1157, 1165, 1166, 1171, 1172, 1248, 1249, 1285, 1338, 1348, 1430, 1489, 1490, 1564, 1580, 1581, 1589, 1597, 1611, 1702, 1840, or 1842, and a modification pattern described herein (e.g. modification pattern 1S, 2S, 3S, 4S, 5S, or 6S, or modification pattern 7S, 8S, or 9S).

[0068] The siRNA may comprise an unmodified version of an antisense strand sequence of an siRNA that reduced an ANGPTL4 mRNA measurement by 10% or more, relative to a control, in Table 5 or Table 6. In some embodiments, the siRNA comprises the antisense strand sequence of any one of SEQ ID NOS: 1886, 1887, 1889, 1890, 1975, 2134, 2136, 2143, 2144, 2146, 2175, 2177, 2180, 2186, 2188, 2338, 2363, 2373, 2419, 2424, 2425, 2474, 2491, 2494, 2613, 2688, 2730, 2855, 2987, 2988, 2991, 3003, 3005, 3008, 3011, 3019, 3020, 3025, 3026, 3102, 3103, 3139, 3192, 3202, 3284, 3343, 3344, 3418, 3434, 3435, 3443, 3451, 3465, 3556, 3694, or 3696, or a nucleic acid sequence thereof having 3 or 4 nucleoside substitutions, additions, or deletions. In some embodiments, the siRNA comprises the antisense strand sequence of any one of SEQ ID NOS: 1886, 1887, 1889, 1890, 1975, 2134, 2136, 2143, 2144, 2146, 2175, 2177, 2180, 2186, 2188, 2338, 2363, 2373, 2419, 2424, 2425, 2474, 2491, 2494, 2613, 2688, 2730, 2855, 2987, 2988, 2991, 3003, 3005, 3008, 3011, 3019, 3020, 3025, 3026, 3102, 3103, 3139, 3192, 3202, 3284, 3343, 3344, 3418, 3434, 3435, 3443, 3451, 3465, 3556, 3694, or 3696, or a nucleic acid sequence thereof having 1 or 2 nucleoside substitutions, additions, or deletions. In some embodiments, the siRNA comprises the antisense strand sequence of any one of SEQ ID NOS: 1886, 1887, 1889, 1890, 1975, 2134, 2136, 2143, 2144, 2146, 2175, 2177, 2180, 2186, 2188, 2338, 2363, 2373, 2419, 2424, 2425, 2474, 2491, 2494, 2613, 2688, 2730, 2855, 2987, 2988, 2991, 3003, 3005, 3008, 3011, 3019, 3020, 3025, 3026, 3102, 3103, 3139, 3192, 3202, 3284, 3343, 3344, 3418, 3434, 3435, 3443, 3451, 3465, 3556, 3694, or 3696. The siRNA may include the antisense strand sequence of any one of SEQ ID NOS: 1886, 1887, 1889, 1890, 1975, 2134, 2136, 2143, 2144, 2146, 2175, 2177, 2180, 2186, 2188, 2338, 2363, 2373, 2419, 2424, 2425, 2474, 2491, 2494, 2613, 2688, 2730, 2855, 2987, 2988, 2991, 3003, 3005, 3008, 3011, 3019, 3020, 3025, 3026, 3102, 3103, 3139, 3192, 3202, 3284, 3343, 3344, 3418, 3434, 3435, 3443, 3451, 3465, 3556, 3694, or 3696, and one or more internucleoside linkages and/or one or more nucleoside modifications. The siRNA may include the antisense strand sequence of any one of SEQ ID NOS: 1886, 1887, 1889, 1890, 1975, 2134, 2136, 2143, 2144, 2146, 2175, 2177, 2180, 2186, 2188, 2338, 2363, 2373, 2419, 2424, 2425, 2474, 2491, 2494, 2613, 2688, 2730, 2855, 2987, 2988, 2991, 3003, 3005, 3008, 3011, 3019, 3020, 3025, 3026, 3102, 3103, 3139, 3192, 3202, 3284, 3343, 3344, 3418, 3434, 3435, 3443, 3451, 3465, 3556, 3694, or 3696, and a modification pattern described herein (e.g. any of modification patterns 1S-16S or 1AS-15AS).

[0069] In some embodiments, the siRNA comprises the sense strand and/or the antisense strand sequence of an siRNA in Table 7, or a nucleic acid sequence thereof having 3 or 4 nucleoside substitutions, additions, or deletions. In some embodiments, the siRNA comprises the sense strand and/or the antisense strand sequence of an siRNA in Table 7, or a nucleic acid sequence thereof having 1 or 2 nucleoside substitutions, additions, or deletions. In some embodiments, the siRNA comprises the sense strand and/or the antisense strand sequence of an siRNA in Table 7. In some embodiments, the siRNA comprises one or more of the internucleoside linkages and/or nucleoside modifications of the siRNA in Table 7. In some embodiments, the siRNA comprises the internucleoside linkages and/or nucleoside modifications of the siRNA in Table 7. In some embodiments, the siRNA is unmodified.

[0070] In some embodiments, the siRNA comprises the sense strand and/or the antisense strand sequence of an siRNA in Table 8, or a nucleic acid sequence thereof having 3 or 4 nucleoside substitutions, additions, or deletions. In some embodiments, the siRNA comprises the sense strand and/or the antisense strand sequence of an siRNA in Table 8, or a nucleic acid sequence thereof having 1 or 2 nucleoside substitutions, additions, or deletions. In some embodiments, the siRNA comprises the sense strand and/or the antisense strand sequence of an siRNA in Table 8. In some embodiments, the siRNA comprises one or more of the internucleoside linkages and/or nucleoside modifications of the siRNA in Table 8. In some embodiments, the siRNA comprises the internucleoside linkages and/or nucleoside modifications of the siRNA in Table 8. In some embodiments, the siRNA is unmodified.

[0071] In some embodiments, the siRNA comprises the sense strand and/or the antisense strand sequence of an siRNA in Table 10, or a nucleic acid sequence thereof having 3 or 4 nucleoside substitutions, additions, or deletions. In some embodiments, the siRNA comprises the sense strand and/or the antisense strand sequence of an siRNA in Table 10, or a nucleic acid sequence thereof having 1 or 2 nucleoside substitutions, additions, or deletions. In some embodiments, the siRNA comprises the sense strand and/or the antisense strand sequence of an siRNA in Table 10. In some embodiments, the siRNA comprises one or more of the internucleoside linkages and/or nucleoside modifications of the siRNA in Table 10. In some embodiments, the siRNA comprises the internucleoside linkages and/or nucleoside modifications of the siRNA in Table 10. In some embodiments, the siRNA is unmodified.

[0072] In some embodiments, the siRNA comprises the sense strand and/or the antisense strand sequence of an siRNA in Table 15, or a nucleic acid sequence thereof having 3 or 4 nucleoside substitutions, additions, or deletions. In some embodiments, the siRNA comprises the sense strand and/or the antisense strand sequence of an siRNA in Table 15, or a nucleic acid sequence thereof having 1 or 2 nucleoside substitutions, additions, or deletions. In some embodiments, the siRNA comprises the sense strand and/or the antisense strand sequence of an siRNA in Table 15. In some embodiments, the siRNA comprises one or more of the internucleoside linkages and/or nucleoside modifications of the siRNA in Table 15. In some embodiments, the siRNA comprises the internucleoside linkages and/or nucleoside modifications of the siRNA in Table 15. In some embodiments, the siRNA is unmodified.

[0073] In some embodiments, the siRNA comprises the sense strand and/or the antisense strand sequence of an siRNA in Table 16, or a nucleic acid sequence thereof having 3 or 4 nucleoside substitutions, additions, or deletions. In some embodiments, the siRNA comprises the sense strand and/or the antisense strand sequence of an siRNA in Table 16, or a nucleic acid sequence thereof having 1 or 2 nucleoside substitutions, additions, or deletions. In some embodiments, the siRNA comprises the sense strand and/or the antisense strand sequence of an siRNA in Table 16. In some embodiments, the siRNA comprises one or more of the internucleoside linkages and/or nucleoside modifications of the siRNA in Table 16. In some embodiments, the siRNA comprises the internucleoside linkages and/or nucleoside modifications of the siRNA in Table 16. In some embodiments, the siRNA is unmodified.

[0074] In some embodiments, the siRNA comprises the sense strand sequence of an siRNA in Table 25A, or a sequence thereof having 3 or 4 nucleoside substitutions, additions, or deletions. In some embodiments, the siRNA comprises the sense strand sequence of an siRNA in Table 25A, or a sequence thereof having 1 or 2 nucleoside substitutions, additions, or deletions. In some embodiments, the siRNA comprises the sense strand sequence of an siRNA in Table 25A. In some embodiments, the siRNA comprises the antisense strand sequence of an siRNA in Table 25A, or a sequence thereof having 3 or 4 nucleoside substitutions, additions, or deletions. In some embodiments, the siRNA comprises the antisense strand sequence of an siRNA in Table 25A, or a sequence thereof having 1 or 2 nucleoside substitutions, additions, or deletions. In some embodiments, the siRNA comprises the antisense strand sequence of an siRNA in Table 25A.

[0075] In some embodiments, the siRNA comprises the sense strand sequence of an siRNA in Table 28A, or a sequence thereof having 3 or 4 nucleoside substitutions, additions, or deletions. In some embodiments, the siRNA comprises the sense strand sequence of an siRNA in Table 28A, or a sequence thereof having 1 or 2 nucleoside substitutions, additions, or deletions. In some embodiments, the siRNA comprises the sense strand sequence of an siRNA in Table 28A. In some embodiments, the siRNA comprises the antisense strand sequence of an siRNA in Table 28A, or a sequence thereof having 3 or 4 nucleoside substitutions, additions, or deletions. In some embodiments, the siRNA comprises the antisense strand sequence of an siRNA in Table 28A, or a sequence thereof having 1 or 2 nucleoside substitutions, additions, or deletions. In some embodiments, the siRNA comprises the antisense strand sequence of an siRNA in Table 28A.

[0076] In some embodiments, the siRNA comprises the sense strand and/or the antisense strand sequence of an siRNA described herein such as in any Table included herein, or a nucleic acid sequence thereof having 3 or 4 nucleoside substitutions, additions, or deletions. In some embodiments, the siRNA comprises the sense strand and/or the antisense strand sequence of an siRNA described herein such as in any Table included herein, or a nucleic acid sequence thereof having 1 or 2 nucleoside substitutions, additions, or deletions. In some embodiments, the siRNA comprises the sense strand and/or the antisense strand sequence of an siRNA described herein such as in any Table included herein.

[0077] In some embodiments, the sense strand comprises a nucleoside sequence at least 85% identical to any one of SEQ ID NOS: 13970-13973. In some embodiments, the sense strand comprises the nucleoside sequence of any one of SEQ ID NOS: 13970-13973, or a sense strand sequence thereof having 1 or 2 nucleoside substitutions, additions, or deletions. In some embodiments, the sense strand comprises the nucleoside sequence of any one of SEQ ID NOS: 13970-13973. The siRNA may include the sense strand sequence of any one of SEQ ID NOS: 13970-13973, and one or more internucleoside linkages and/or one or more nucleoside modifications. The siRNA may include the sense strand sequence of any one of SEQ ID NOS: 13970-13973, and a modification pattern described herein (e.g. modification pattern 1S, 2S, 3S, 4S, 5S, or 6S, or modification pattern 7S, 8S, or 9S). The sense strand may include an overhang (e.g. a 2 nucleotide overhang such as 2 uracil nucleotides).

[0078] In some embodiments, the antisense strand comprises a nucleoside sequence at least 85% identical to any one of SEQ ID NOS: 13978-13981. In some embodiments, the antisense strand comprises the nucleoside sequence of any one of SEQ ID NOS: 13978-13981, or an antisense strand sequence thereof having 1 or 2 nucleoside substitutions, additions, or deletions. In some embodiments, the antisense strand comprises the nucleoside sequence of any one of SEQ ID NOS: 13978-13981. The siRNA may include the sense strand sequence of any one of SEQ ID NOS: 13978-13981, and one or more internucleoside linkages and/or one or more nucleoside modifications. The siRNA may include the sense strand sequence of any one of SEQ ID NOS: 13978-13981, and a modification pattern described herein (e.g. any of modification patterns 1S-16S or 1AS-15AS). The antisense strand may include an overhang (e.g. a 2 nucleotide overhang such as 2 uracil nucleotides).

[0079] In some embodiments, the sense strand comprises a nucleoside sequence at least 85% identical to any one of SEQ ID NOS: 13974-13977. In some embodiments, the sense strand comprises the nucleoside sequence of any one of SEQ ID NOS: 13974-13977, or a sense strand sequence thereof having 1 or 2 nucleoside substitutions, additions, or deletions. In some embodiments, the sense strand comprises the nucleoside sequence of any one of SEQ ID NOS: 13974-13977. The siRNA may include the sense strand sequence of any one of SEQ ID NOS: 13974-13977, and one or more internucleoside linkages and/or one or more nucleoside modifications. The siRNA may include the sense strand sequence of any one of SEQ ID NOS: 13974-13977, and a modification pattern described herein (e.g. modification pattern 1S, 2S, 3S, 4S, 5S, or 6S, or modification pattern 7S, 8S, or 9S). The sense strand may include an overhang.

[0080] In some embodiments, the antisense strand comprises a nucleoside sequence at least 85% identical to any one of SEQ ID NOS: 13982-13985. In some embodiments, the antisense strand comprises the nucleoside sequence of any one of SEQ ID NOS: 13982-13985, or an antisense strand sequence thereof having 1 or 2 nucleoside substitutions, additions, or deletions. In some embodiments, the antisense strand comprises the nucleoside sequence of any one of SEQ ID NOS: 13982-13985. The siRNA may include the sense strand sequence of any one of SEQ ID NOS: 13982-13985, and one or more internucleoside linkages and/or one or more nucleoside modifications. The siRNA may include the sense strand sequence of any one of SEQ ID NOS: 13982-13985, and a modification pattern described herein (e.g. any of modification patterns 1S-16S or 1AS-15AS). The antisense strand may include an overhang.

[0081] In some embodiments, the sense strand and/or antisense strand comprises a nucleoside sequence at least 85% identical to the sense strand and/or antisense strand of any one of EDT01062 to ETD01065, EDT01062.1 to ETD01065.1, EDT01062.2 to ETD01065.2, EDT01062.3 to ETD01065.3, EDT01062.4 to ETD01065.4, EDT01062.5 to ETD01065.5, EDT01062.6 to ETD01065.6, EDT01062.7 to ETD01065.7, or EDT01062.8 to ETD01065.8. In some embodiments, the sense strand and/or antisense strand comprises the sense strand and/or antisense strand of any one of EDT01062 to ETD01065, EDT01062.1 to ETD01065.1, EDT01062.2 to ETD01065.2, EDT01062.3 to ETD01065.3, EDT01062.4 to ETD01065.4, EDT01062.5 to ETD01065.5, EDT01062.6 to ETD01065.6, EDT01062.7 to ETD01065.7, or EDT01062.8 to ETD01065.8, or a sense strand and/or antisense strand sequence thereof having 1 or 2 nucleoside substitutions, additions, or deletions. In some embodiments, the sense strand and/or antisense strand comprises the sense strand and/or antisense strand of any one of EDT01062 to ETD01065, EDT01062.1 to ETD01065.1, EDT01062.2 to ETD01065.2, EDT01062.3 to ETD01065.3, EDT01062.4 to ETD01065.4, EDT01062.5 to ETD01065.5, EDT01062.6 to ETD01065.6, EDT01062.7 to ETD01065.7, or EDT01062.8 to ETD01065.8. The sense strand and/or antisense strand may comprise a GalNAc ligand. The sense strand and/or antisense strand may exclude any GalNAc ligand.

[0082] The sense strand may comprise the nucleoside sequence of SEQ ID NO: 13973, or a derivative thereof. In some embodiments, the sense strand comprises a nucleoside sequence at least 85% identical to SEQ ID NO: 13973. The sense strand comprising the nucleoside sequence of SEQ ID NO: 13973, or derivative thereof, may include the sense strand comprising a nucleoside sequence at least 85% identical to SEQ ID NO: 13973. In some embodiments, the sense strand comprises the nucleoside sequence of SEQ ID NO: 13973, or a sense strand sequence thereof having 1 or 2 nucleoside substitutions, additions, or deletions. The sense strand comprising the nucleoside sequence of SEQ ID NO: 13973 derivative may include the sense strand comprising a nucleoside sequence having 1 or 2 nucleoside substitutions, additions, or deletions. In some embodiments, the sense strand comprises the nucleoside sequence of SEQ ID NO: 13973. The sense strand sequence may consist of the nucleotide sequence of SEQ ID NO: 13973. The sense strand comprising the nucleoside sequence of SEQ ID NO: 13973, or derivative thereof, may include a GalNAc ligand (e.g. attached to a 3′ or 5′ end). The sense strand comprising the nucleoside sequence of SEQ ID NO: 13973, or derivative thereof, may include a 2 nucleotide overhang. The sense strand comprising the nucleoside sequence of SEQ ID NO: 13973, or derivative thereof, may include modification pattern 1S. The sense strand comprising the nucleoside sequence of SEQ ID NO: 13973, or derivative thereof, may include modification pattern 2S. The sense strand comprising the nucleoside sequence of SEQ ID NO: 13973, or derivative thereof, may include modification pattern 3S. The sense strand comprising the nucleoside sequence of SEQ ID NO: 13973, or derivative thereof, may include modification pattern 4S. The sense strand comprising the nucleoside sequence of SEQ ID NO: 13973, or derivative thereof, may include modification pattern 5S. The sense strand comprising the nucleoside sequence of SEQ ID NO: 13973, or derivative thereof, may include modification pattern 6S. The sense strand comprising the nucleoside sequence of SEQ ID NO: 13973, or derivative thereof, may include modification pattern 7S. The sense strand comprising the nucleoside sequence of SEQ ID NO: 13973, or derivative thereof, may include modification pattern 8S. The sense strand comprising the nucleoside sequence of SEQ ID NO: 13973, or derivative thereof, may include modification pattern 9S.

[0083] The sense strand may comprise the nucleoside sequence of SEQ ID NO: 13977, or a derivative thereof. In some embodiments, the sense strand comprises a nucleoside sequence at least 85% identical to SEQ ID NO: 13977. The sense strand comprising the nucleoside sequence of SEQ ID NO: 13977, or derivative thereof, may include the sense strand comprising a nucleoside sequence at least 85% identical to SEQ ID NO: 13977. In some embodiments, the sense strand comprises the nucleoside sequence of SEQ ID NO: 13977, or a sense strand sequence thereof having 1 or 2 nucleoside substitutions, additions, or deletions. The sense strand comprising the nucleoside sequence of SEQ ID NO: 13977 derivative may include the sense strand comprising a nucleoside sequence having 1 or 2 nucleoside substitutions, additions, or deletions. In some embodiments, the sense strand comprises the nucleoside sequence of SEQ ID NO: 13977. The sense strand sequence may consist of the nucleotide sequence of SEQ ID NO: 13977. The sense strand comprising the nucleoside sequence of SEQ ID NO: 13977, or derivative thereof, may include a GalNAc ligand (e.g. attached to a 3′ or 5′ end). The sense strand comprising the nucleoside sequence of SEQ ID NO: 13977, or derivative thereof, may include a 2 nucleotide overhang. The sense strand comprising the nucleoside sequence of SEQ ID NO: 13977, or derivative thereof, may include modification pattern 1S. The sense strand comprising the nucleoside sequence of SEQ ID NO: 13977, or derivative thereof, may include modification pattern 2S. The sense strand comprising the nucleoside sequence of SEQ ID NO: 13977, or derivative thereof, may include modification pattern 3S. The sense strand comprising the nucleoside sequence of SEQ ID NO: 13977, or derivative thereof, may include modification pattern 4S. The sense strand comprising the nucleoside sequence of SEQ ID NO: 13977, or derivative thereof, may include modification pattern 5S. The sense strand comprising the nucleoside sequence of SEQ ID NO: 13977, or derivative thereof, may include modification pattern 6S. The sense strand comprising the nucleoside sequence of SEQ ID NO: 13977, or derivative thereof, may include modification pattern 7S. The sense strand comprising the nucleoside sequence of SEQ ID NO: 13977, or derivative thereof, may include modification pattern 8S. The sense strand comprising the nucleoside sequence of SEQ ID NO: 13977, or derivative thereof, may include modification pattern 9S.

[0084] The antisense strand may comprise the nucleoside sequence of SEQ ID NO: 13981, or a derivative thereof. In some embodiments, the antisense strand comprises a nucleoside sequence at least 85% identical to SEQ ID NO: 13981. The antisense strand comprising the nucleoside sequence of SEQ ID NO: 13981, or derivative thereof, may include the antisense strand comprising a nucleoside sequence at least 85% identical to SEQ ID NO: 13981. In some embodiments, the antisense strand comprises the nucleoside sequence of SEQ ID NO: 13981, or an antisense strand sequence thereof having 1 or 2 nucleoside substitutions, additions, or deletions. The antisense strand comprising the nucleoside sequence of SEQ ID NO: 13981 derivative may include the antisense strand comprising a nucleoside sequence having 1 or 2 nucleoside substitutions, additions, or deletions. In some embodiments, the antisense strand comprises the nucleoside sequence of SEQ ID NO: 13981. The antisense strand sequence may consist of the nucleotide sequence of SEQ ID NO: 13981. The antisense strand comprising the nucleoside sequence of SEQ ID NO: 13981, or derivative thereof, may include a GalNAc ligand (e.g. attached to a 3′ or 5′ end). The antisense strand comprising the nucleoside sequence of SEQ ID NO: 13981, or derivative thereof, may include a 2 nucleotide overhang. The antisense strand comprising the nucleoside sequence of SEQ ID NO: 13981, or derivative thereof, may include modification pattern 1AS. The antisense strand comprising the nucleoside sequence of SEQ ID NO: 13981, or derivative thereof, may include modification pattern 2AS. The antisense strand comprising the nucleoside sequence of SEQ ID NO: 13981, or derivative thereof, may include modification pattern 3AS. The antisense strand comprising the nucleoside sequence of SEQ ID NO: 13981, or derivative thereof, may include modification pattern 4AS. The antisense strand comprising the nucleoside sequence of SEQ ID NO: 13981, or derivative thereof, may include modification pattern 5AS. The antisense strand comprising the nucleoside sequence of SEQ ID NO: 13981, or derivative thereof, may include modification pattern 6AS. The antisense strand comprising the nucleoside sequence of SEQ ID NO: 13981, or derivative thereof, may include modification pattern 7AS. The antisense strand comprising the nucleoside sequence of SEQ ID NO: 13981, or derivative thereof, may include modification pattern 8AS. The antisense strand comprising the nucleoside sequence of SEQ ID NO: 13981, or derivative thereof, may include modification pattern 9AS. The antisense strand comprising the nucleoside sequence of SEQ ID NO: 13981, or derivative thereof, may include modification pattern 10AS. The antisense strand comprising the nucleoside sequence of SEQ ID NO: 13981, or derivative thereof, may include modification pattern 11AS.

[0085] The antisense strand may comprise the nucleoside sequence of SEQ ID NO: 13985, or a derivative thereof. In some embodiments, the antisense strand comprises a nucleoside sequence at least 85% identical to SEQ ID NO: 13985. The antisense strand comprising the nucleoside sequence of SEQ ID NO: 13985, or derivative thereof, may include the antisense strand comprising a nucleoside sequence at least 85% identical to SEQ ID NO: 13985. In some embodiments, the antisense strand comprises the nucleoside sequence of SEQ ID NO: 13985, or an antisense strand sequence thereof having 1 or 2 nucleoside substitutions, additions, or deletions. The antisense strand comprising the nucleoside sequence of SEQ ID NO: 13985 derivative may include the antisense strand comprising a nucleoside sequence having 1 or 2 nucleoside substitutions, additions, or deletions. In some embodiments, the antisense strand comprises the nucleoside sequence of SEQ ID NO: 13985. The antisense strand sequence may consist of the nucleotide sequence of SEQ ID NO: 13985. The antisense strand comprising the nucleoside sequence of SEQ ID NO: 13985, or derivative thereof, may include a GalNAc ligand (e.g. attached to a 3′ or 5′ end). The antisense strand comprising the nucleoside sequence of SEQ ID NO: 13985, or derivative thereof, may include a 2 nucleotide overhang. The antisense strand comprising the nucleoside sequence of SEQ ID NO: 13985, or derivative thereof, may include modification pattern 1AS. The antisense strand comprising the nucleoside sequence of SEQ ID NO: 13985, or derivative thereof, may include modification pattern 2AS. The antisense strand comprising the nucleoside sequence of SEQ ID NO: 13985, or derivative thereof, may include modification pattern 3AS. The antisense strand comprising the nucleoside sequence of SEQ ID NO: 13985, or derivative thereof, may include modification pattern 4AS. The antisense strand comprising the nucleoside sequence of SEQ ID NO: 13985, or derivative thereof, may include modification pattern 5AS. The antisense strand comprising the nucleoside sequence of SEQ ID NO: 13985, or derivative thereof, may include modification pattern 6AS. The antisense strand comprising the nucleoside sequence of SEQ ID NO: 13985, or derivative thereof, may include modification pattern 7AS. The antisense strand comprising the nucleoside sequence of SEQ ID NO: 13985, or derivative thereof, may include modification pattern 8AS. The antisense strand comprising the nucleoside sequence of SEQ ID NO: 13985, or derivative thereof, may include modification pattern 9AS. The antisense strand comprising the nucleoside sequence of SEQ ID NO: 13985, or derivative thereof, may include modification pattern 10AS. The antisense strand comprising the nucleoside sequence of SEQ ID NO: 13985, or derivative thereof, may include modification pattern 11AS.

[0086] In some embodiments, the sense strand comprises a nucleoside sequence at least 85% identical to any one of SEQ ID NOS: 14006-14011. In some embodiments, the sense strand comprises the nucleoside sequence of any one of SEQ ID NOS: 14006-14011, or a sense strand sequence thereof having 1 or 2 nucleoside substitutions, additions, or deletions. In some embodiments, the sense strand comprises the nucleoside sequence of any one of SEQ ID NOS: 14006-14011. The sense strand may comprise a GalNAc ligand. In some embodiments, the antisense strand comprises a nucleoside sequence at least 85% identical to any one of SEQ ID NOS: 14158-14166. In some embodiments, the antisense strand comprises the nucleoside sequence of any one of SEQ ID NOS: 14158-14166, or an antisense strand sequence thereof having 1 or 2 nucleoside substitutions, additions, or deletions. In some embodiments, the antisense strand comprises the nucleoside sequence of any one of SEQ ID NOS: 14158-14166. The antisense strand may comprise a GalNAc ligand.

[0087] In some embodiments, the siRNA comprises a sense strand comprising the sequence of SEQ ID NO: 13970, or a nucleic acid sequence thereof having 3 or 4 nucleoside substitutions, additions, or deletions. In some embodiments, the siRNA comprises a sense strand comprising the sequence of SEQ ID NO: 13970, or a nucleic acid sequence thereof having 1 or 2 nucleoside substitutions, additions, or deletions. In some embodiments, the siRNA comprises a sense strand comprising the sequence of SEQ ID NO: 13970. In some embodiments, the sense strand comprises one or more internucleoside linkages and/or nucleoside modifications. In some embodiments, the siRNA comprises an antisense strand comprising the sequence of SEQ ID NO: 13978, or a nucleic acid sequence thereof having 3 or 4 nucleoside substitutions, additions, or deletions. In some embodiments, the siRNA comprises an antisense strand comprising the sequence of SEQ ID NO: 13978, or a nucleic acid sequence thereof having 1 or 2 nucleoside substitutions, additions, or deletions. In some embodiments, the siRNA comprises an antisense strand comprising the sequence of SEQ ID NO: 13978. In some embodiments, the antisense strand comprises one or more internucleoside linkages and/or nucleoside modifications.

[0088] In some embodiments, the siRNA comprises a sense strand comprising the sequence of SEQ ID NO: 13971, or a nucleic acid sequence thereof having 3 or 4 nucleoside substitutions, additions, or deletions. In some embodiments, the siRNA comprises a sense strand comprising the sequence of SEQ ID NO: 13971, or a nucleic acid sequence thereof having 1 or 2 nucleoside substitutions, additions, or deletions. In some embodiments, the siRNA comprises a sense strand comprising the sequence of SEQ ID NO: 13971. In some embodiments, the sense strand comprises one or more internucleoside linkages and/or nucleoside modifications. In some embodiments, the siRNA comprises an antisense strand comprising the sequence of SEQ ID NO: 13979, or a nucleic acid sequence thereof having 3 or 4 nucleoside substitutions, additions, or deletions. In some embodiments, the siRNA comprises an antisense strand comprising the sequence of SEQ ID NO: 13979, or a nucleic acid sequence thereof having 1 or 2 nucleoside substitutions, additions, or deletions. In some embodiments, the siRNA comprises an antisense strand comprising the sequence of SEQ ID NO: 13979. In some embodiments, the antisense strand comprises one or more internucleoside linkages and/or nucleoside modifications.

[0089] In some embodiments, the siRNA comprises a sense strand comprising the sequence of SEQ ID NO: 13972, or a nucleic acid sequence thereof having 3 or 4 nucleoside substitutions, additions, or deletions. In some embodiments, the siRNA comprises a sense strand comprising the sequence of SEQ ID NO: 13972, or a nucleic acid sequence thereof having 1 or 2 nucleoside substitutions, additions, or deletions. In some embodiments, the siRNA comprises a sense strand comprising the sequence of SEQ ID NO: 13972. In some embodiments, the sense strand comprises one or more internucleoside linkages and/or nucleoside modifications. In some embodiments, the siRNA comprises an antisense strand comprising the sequence of SEQ ID NO: 13980, or a nucleic acid sequence thereof having 3 or 4 nucleoside substitutions, additions, or deletions. In some embodiments, the siRNA comprises an antisense strand comprising the sequence of SEQ ID NO: 13980, or a nucleic acid sequence thereof having 1 or 2 nucleoside substitutions, additions, or deletions. In some embodiments, the siRNA comprises an antisense strand comprising the sequence of SEQ ID NO: 13980. In some embodiments, the antisense strand comprises one or more internucleoside linkages and/or nucleoside modifications.

[0090] In some embodiments, the siRNA comprises a sense strand comprising the sequence of SEQ ID NO: 13973, or a nucleic acid sequence thereof having 3 or 4 nucleoside substitutions, additions, or deletions. In some embodiments, the siRNA comprises a sense strand comprising the sequence of SEQ ID NO: 13973, or a nucleic acid sequence thereof having 1 or 2 nucleoside substitutions, additions, or deletions. In some embodiments, the siRNA comprises a sense strand comprising the sequence of SEQ ID NO: 13973. In some embodiments, the sense strand comprises one or more internucleoside linkages and/or nucleoside modifications. In some embodiments, the siRNA comprises an antisense strand comprising the sequence of SEQ ID NO: 13981, or a nucleic acid sequence thereof having 3 or 4 nucleoside substitutions, additions, or deletions. In some embodiments, the siRNA comprises an antisense strand comprising the sequence of SEQ ID NO: 13981, or a nucleic acid sequence thereof having 1 or 2 nucleoside substitutions, additions, or deletions. In some embodiments, the siRNA comprises an antisense strand comprising the sequence of SEQ ID NO: 13981. In some embodiments, the antisense strand comprises one or more internucleoside linkages and/or nucleoside modifications.

[0091] In some embodiments, the siRNA comprises a sense strand comprising the sequence of SEQ ID NO: 1285, or a nucleic acid sequence thereof having 3 or 4 nucleoside substitutions, additions, or deletions. In some embodiments, the siRNA comprises a sense strand comprising the sequence of SEQ ID NO: 1285, or a nucleic acid sequence thereof having 1 or 2 nucleoside substitutions, additions, or deletions. In some embodiments, the siRNA comprises a sense strand comprising the sequence of SEQ ID NO: 1285. In some embodiments, the sense strand comprises one or more internucleoside linkages and/or nucleoside modifications. In some embodiments, the siRNA comprises an antisense strand comprising the sequence of SEQ ID NO: 3139, or a nucleic acid sequence thereof having 3 or 4 nucleoside substitutions, additions, or deletions. In some embodiments, the siRNA comprises an antisense strand comprising the sequence of SEQ ID NO: 3139, or a nucleic acid sequence thereof having 1 or 2 nucleoside substitutions, additions, or deletions. In some embodiments, the siRNA comprises an antisense strand comprising the sequence of SEQ ID NO: 3139. In some embodiments, the antisense strand comprises one or more internucleoside linkages and/or nucleoside modifications.

[0092] In some embodiments, the siRNA comprises a sense strand comprising the sequence of SEQ ID NO: 1580, or a nucleic acid sequence thereof having 3 or 4 nucleoside substitutions, additions, or deletions. In some embodiments, the siRNA comprises a sense strand comprising the sequence of SEQ ID NO: 1580, or a nucleic acid sequence thereof having 1 or 2 nucleoside substitutions, additions, or deletions. In some embodiments, the siRNA comprises a sense strand comprising the sequence of SEQ ID NO: 1580. In some embodiments, the sense strand comprises one or more internucleoside linkages and/or nucleoside modifications. In some embodiments, the siRNA comprises an antisense strand comprising the sequence of SEQ ID NO: 3434, or a nucleic acid sequence thereof having 3 or 4 nucleoside substitutions, additions, or deletions. In some embodiments, the siRNA comprises an antisense strand comprising the sequence of SEQ ID NO: 3434, or a nucleic acid sequence thereof having 1 or 2 nucleoside substitutions, additions, or deletions. In some embodiments, the siRNA comprises an antisense strand comprising the sequence of SEQ ID NO: 3434. In some embodiments, the antisense strand comprises one or more internucleoside linkages and/or nucleoside modifications.

[0093] In some embodiments, the siRNA comprises a sense strand comprising the sequence of SEQ ID NO: 13974, or a nucleic acid sequence thereof having 3 or 4 nucleoside substitutions, additions, or deletions. In some embodiments, the siRNA comprises a sense strand comprising the sequence of SEQ ID NO: 13974, or a nucleic acid sequence thereof having 1 or 2 nucleoside substitutions, additions, or deletions. In some embodiments, the siRNA comprises a sense strand comprising the sequence of SEQ ID NO: 13974. In some embodiments, the sense strand comprises one or more internucleoside linkages and/or nucleoside modifications. In some embodiments, the siRNA comprises an antisense strand comprising the sequence of SEQ ID NO: 13982, or a nucleic acid sequence thereof having 3 or 4 nucleoside substitutions, additions, or deletions. In some embodiments, the siRNA comprises an antisense strand comprising the sequence of SEQ ID NO: 13982, or a nucleic acid sequence thereof having 1 or 2 nucleoside substitutions, additions, or deletions. In some embodiments, the siRNA comprises an antisense strand comprising the sequence of SEQ ID NO: 13982. In some embodiments, the antisense strand comprises one or more internucleoside linkages and/or nucleoside modifications.

[0094] In some embodiments, the siRNA comprises a sense strand comprising the sequence of SEQ ID NO: 13975, or a nucleic acid sequence thereof having 3 or 4 nucleoside substitutions, additions, or deletions. In some embodiments, the siRNA comprises a sense strand comprising the sequence of SEQ ID NO: 13975, or a nucleic acid sequence thereof having 1 or 2 nucleoside substitutions, additions, or deletions. In some embodiments, the siRNA comprises a sense strand comprising the sequence of SEQ ID NO: 13975. In some embodiments, the sense strand comprises one or more internucleoside linkages and/or nucleoside modifications. In some embodiments, the siRNA comprises an antisense strand comprising the sequence of SEQ ID NO: 13983, or a nucleic acid sequence thereof having 3 or 4 nucleoside substitutions, additions, or deletions. In some embodiments, the siRNA comprises an antisense strand comprising the sequence of SEQ ID NO: 13983, or a nucleic acid sequence thereof having 1 or 2 nucleoside substitutions, additions, or deletions. In some embodiments, the siRNA comprises an antisense strand comprising the sequence of SEQ ID NO: 13983. In some embodiments, the antisense strand comprises one or more internucleoside linkages and/or nucleoside modifications.

[0095] In some embodiments, the siRNA comprises a sense strand comprising the sequence of SEQ ID NO: 13976, or a nucleic acid sequence thereof having 3 or 4 nucleoside substitutions, additions, or deletions. In some embodiments, the siRNA comprises a sense strand comprising the sequence of SEQ ID NO: 13976, or a nucleic acid sequence thereof having 1 or 2 nucleoside substitutions, additions, or deletions. In some embodiments, the siRNA comprises a sense strand comprising the sequence of SEQ ID NO: 13976. In some embodiments, the sense strand comprises one or more internucleoside linkages and/or nucleoside modifications. In some embodiments, the siRNA comprises an antisense strand comprising the sequence of SEQ ID NO: 13984, or a nucleic acid sequence thereof having 3 or 4 nucleoside substitutions, additions, or deletions. In some embodiments, the siRNA comprises an antisense strand comprising the sequence of SEQ ID NO: 13984, or a nucleic acid sequence thereof having 1 or 2 nucleoside substitutions, additions, or deletions. In some embodiments, the siRNA comprises an antisense strand comprising the sequence of SEQ ID NO: 13984. In some embodiments, the antisense strand comprises one or more internucleoside linkages and/or nucleoside modifications.

[0096] In some embodiments, the siRNA comprises a sense strand comprising the sequence of SEQ ID NO: 13977, or a nucleic acid sequence thereof having 3 or 4 nucleoside substitutions, additions, or deletions. In some embodiments, the siRNA comprises a sense strand comprising the sequence of SEQ ID NO: 13977, or a nucleic acid sequence thereof having 1 or 2 nucleoside substitutions, additions, or deletions. In some embodiments, the siRNA comprises a sense strand comprising the sequence of SEQ ID NO: 13977. In some embodiments, the sense strand comprises one or more internucleoside linkages and/or nucleoside modifications. In some embodiments, the siRNA comprises an antisense strand comprising the sequence of SEQ ID NO: 13985, or a nucleic acid sequence thereof having 3 or 4 nucleoside substitutions, additions, or deletions. In some embodiments, the siRNA comprises an antisense strand comprising the sequence of SEQ ID NO: 13985, or a nucleic acid sequence thereof having 1 or 2 nucleoside substitutions, additions, or deletions. In some embodiments, the siRNA comprises an antisense strand comprising the sequence of SEQ ID NO: 13985. In some embodiments, the antisense strand comprises one or more internucleoside linkages and/or nucleoside modifications.

[0097] In some embodiments, the composition comprises an oligonucleotide that inhibits the expression of ANGPTL4, wherein the oligonucleotide comprises an siRNA comprising a sense strand and an antisense strand, wherein the antisense strand comprises a seed region that is not identical to a seed region of a human miRNA. In some embodiments, the composition comprises an oligonucleotide that inhibits the expression of ANGPTL4, wherein the oligonucleotide comprises an siRNA comprising a sense strand and an antisense strand, wherein the sense strand comprises a seed region that is not identical to a seed region of a human miRNA. In some embodiments, the siRNA is cross-reactive with a non-human primate (NHP) ANGPTL4 mRNA. For example, the antisense strand may bind to, or be complementary with, the NHP ANGPTL4 mRNA.

### B. ASOs

[0098] In some embodiments, the composition comprises an oligonucleotide that inhibits the expression of ANGPTL4, wherein the oligonucleotide comprises an antisense oligonucleotide (ASO). In some embodiments, the ASO is 12-30 nucleosides in length. In some embodiments, the ASO is 14-30 nucleosides in length. In some embodiments, the ASO is at least about 10, 11, 12, 13, 14, 15, 15, 17, 18, 19, 20, 21, 22, 23, 24, 25, 26, 27, 28, 29, or 30 nucleosides in length, or a range defined by any of the two aforementioned numbers. In some embodiments, the ASO is 15-25 nucleosides in length. In some embodiments, the ASO is 20 nucleosides in length.

[0099] In some embodiments, the composition comprises an oligonucleotide that inhibits the expression of ANGPTL4, wherein the oligonucleotide comprises an antisense oligonucleotide (ASO) about 12-30 nucleosides in length and comprising a nucleoside sequence complementary to about 12-30 contiguous nucleosides of a full-length human ANGPTL4 mRNA sequence such as SEQ ID NO: 13935; wherein (i) the oligonucleotide comprises a modification comprising a modified nucleoside and/or a modified internucleoside linkage, and/or (ii) the composition comprises a pharmaceutically acceptable carrier.

[0100] In some embodiments, the composition comprises an oligonucleotide that inhibits the expression of ANGPTL4, wherein the oligonucleotide comprises an ASO about 12-30 nucleosides in length and comprising a nucleoside sequence complementary to about 12-30 contiguous nucleosides of a full-length human ANGPTL4 mRNA sequence such as SEQ ID NO: 13936; wherein (i) the oligonucleotide comprises a modification comprising a modified nucleoside and/or a modified internucleoside linkage, and/or (ii) the composition comprises a pharmaceutically acceptable carrier.

[0101] In some embodiments, the composition comprises an oligonucleotide that inhibits the expression of ANGPTL4, wherein the oligonucleotide comprises an ASO that comprises a nucleoside sequence comprising or consisting of the sequence of any one of SEQ ID NOs: 3709-13934. In some embodiments, the ASO comprises a nucleoside sequence comprising or consisting of the sequence of any one of SEQ ID NOs: 3709-13934, or a nucleic acid sequence thereof having 1 or 2 nucleoside substitutions, additions, or deletions. In some embodiments, the ASO comprises a nucleoside sequence comprising or consisting of the sequence of any one of SEQ ID NOs: 3709-13934, or a nucleic acid sequence thereof having 3 or 4 nucleoside substitutions, additions, or deletions.

### C. Oligonucleotide Modifications

[0102] In some embodiments, the composition comprises an oligonucleotide that inhibits the expression of ANGPTL4, wherein the oligonucleotide comprises a modification comprising a modified nucleoside and/or a modified internucleoside linkage, and/or (ii) the composition comprises a pharmaceutically acceptable carrier. In some embodiments, the oligonucleotide comprises a modification comprising a modified nucleoside and/or a modified internucleoside linkage. In some embodiments, the oligonucleotide comprises a modified internucleoside linkage. In some embodiments, the modified internucleoside linkage comprises alkylphosphonate, phosphorothioate, methylphosphonate, phosphorodithioate, alkylphosphonothioate, phosphoramidate, carbamate, carbonate, phosphate triester, acetamidate, or carboxymethyl ester, or a combination thereof. In some embodiments, the modified internucleoside linkage comprises one or more phosphorothioate linkages. A phosphorothioate may include a nonbridging oxygen atom in a phosphate backbone of the oligonucleotide that is replaced by sulfur. Modified internucleoside linkages may be included in siRNAs or ASOs. Benefits of the modified internucleoside linkage may include decreased toxicity or improved pharmacokinetics.

[0103] In some embodiments, the composition comprises an oligonucleotide that inhibits the expression of ANGPTL4, wherein the oligonucleotide comprises a modified internucleoside linkage, wherein the oligonucleotide comprises 1, 2, 3, 4, 5, 6, 7, 8, 9, 10, 11, 12, 13, 14, 15, 16, 17, 18, 19, or 20 modified internucleoside linkages, or a range of modified internucleoside linkages defined by any two of the aforementioned numbers. In some embodiments, the oligonucleotide comprises no more than 18 modified internucleoside linkages. In some embodiments, the oligonucleotide comprises no more than 20 modified internucleoside linkages. In some embodiments, the oligonucleotide comprises 2 or more modified internucleoside linkages, 3 or more modified internucleoside linkages, 4 or more modified internucleoside linkages, 5 or more modified internucleoside linkages, 6 or more modified internucleoside linkages, 7 or more modified internucleoside linkages, 8 or more modified internucleoside linkages, 9 or more modified internucleoside linkages, 10 or more modified internucleoside linkages, 11 or more modified internucleoside linkages, 12 or more modified internucleoside linkages, 13 or more modified internucleoside linkages, 14 or more modified internucleoside linkages, 15 or more modified internucleoside linkages, 16 or more modified internucleoside linkages, 17 or more modified internucleoside linkages, 18 or more modified internucleoside linkages, 19 or more modified internucleoside linkages, or 20 or more modified internucleoside linkages.

[0104] In some embodiments, the composition comprises an oligonucleotide that inhibits the expression of ANGPTL4, wherein the oligonucleotide comprises the modified nucleoside. In some embodiments, the modified nucleoside comprises a locked nucleic acid (LNA), hexitol nucleic acid (HLA), cyclohexene nucleic acid (CeNA), 2′-methoxyethyl, 2′-O-alkyl, 2′-O-allyl, 2′-fluoro, or 2′-deoxy, or a combination thereof. In some embodiments, the modified nucleoside comprises a LNA. In some embodiments, the modified nucleoside comprises a 2′,4′ constrained ethyl nucleic acid. In some embodiments, the modified nucleoside comprises HLA. In some embodiments, the modified nucleoside comprises CeNA. In some embodiments, the modified nucleoside comprises a 2′-methoxyethyl group. In some embodiments, the modified nucleoside comprises a 2′-O-alkyl group. In some embodiments, the modified nucleoside comprises a 2′-O-allyl group. In some embodiments, the modified nucleoside comprises a 2′-fluoro group. In some embodiments, the modified nucleoside comprises a 2′-deoxy group. In some embodiments, the modified nucleoside comprises a 2′-O-methyl nucleoside, 2′-deoxyfluoro nucleoside, 2′-O—N-methylacetamido (2′-O-NMA) nucleoside, a 2′-O-dimethylaminoethoxyethyl (2′-O-DMAEOE) nucleoside, 2′-O-aminopropyl (2′-O-AP) nucleoside, or 2′-ara-F, or a combination thereof. In some embodiments, the modified nucleoside comprises a 2′-O-methyl nucleoside. In some embodiments, the modified nucleoside comprises a 2′-deoxyfluoro nucleoside. In some embodiments, the modified nucleoside comprises a 2′-O-NMA nucleoside. In some embodiments, the modified nucleoside comprises a 2′-O-DMAEOE nucleoside. In some embodiments, the modified nucleoside comprises a 2′-O-aminopropyl (2′-O-AP) nucleoside. In some embodiments, the modified nucleoside comprises 2′-ara-F. In some embodiments, the modified nucleoside comprises one or more 2′fluoro modified nucleosides. In some embodiments, the modified nucleoside comprises a 2′ O-alkyl modified nucleoside. Benefits of the modified nucleoside may include decreased toxicity or improved pharmacokinetics.

[0105] In some embodiments, the oligonucleotide comprises 1, 2, 3, 4, 5, 6, 7, 8, 9, 10, 11, 12, 13, 14, 15, 16, 17, 18, 19, 20, or 21 modified nucleosides, or a range of nucleosides defined by any two of the aforementioned numbers. In some embodiments, the oligonucleotide comprises no more than 19 modified nucleosides. In some embodiments, the oligonucleotide comprises no more than 21 modified nucleosides. In some embodiments, the oligonucleotide comprises 2 or more modified nucleosides, 3 or more modified nucleosides, 4 or more modified nucleosides, 5 or more modified nucleosides, 6 or more modified nucleosides, 7 or more modified nucleosides, 8 or more modified nucleosides, 9 or more modified nucleosides, 10 or more modified nucleosides, 11 or more modified nucleosides, 12 or more modified nucleosides, 13 or more modified nucleosides, 14 or more modified nucleosides, 15 or more modified nucleosides, 16 or more modified nucleosides, 17 or more modified nucleosides, 18 or more modified nucleosides, 19 or more modified nucleosides, 20 or more modified nucleosides, or 21 or more modified nucleosides.

[0106] In some embodiments, the composition comprises an oligonucleotide that inhibits the expression of ANGPTL4, wherein the oligonucleotide comprises a moiety attached at a 3′ or 5′ terminus of the oligonucleotide. Examples of moieties include a hydrophobic moiety or a sugar moiety, or a combination thereof. In some embodiments, the oligonucleotide is an siRNA having a sense strand, and the moiety is attached to a 5′ end of the sense strand. In some embodiments, the oligonucleotide is an siRNA having a sense strand, and the moiety is attached to a 3′ end of the sense strand. In some embodiments, the oligonucleotide is an siRNA having an antisense strand, and the moiety is attached to a 5′ end of the antisense strand. In some embodiments, the oligonucleotide is an siRNA having an antisense strand, and the moiety is attached to a 3′ end of the antisense strand. In some embodiments, the oligonucleotide is an ASO, and the moiety is attached to a 5′ end of the ASO. In some embodiments, the oligonucleotide is an ASO, and the moiety is attached to a 3′ end of the ASO.

[0107] The oligonucleotide may include purines. Examples of purines include adenine (A) or guanine (G), or modified versions thereof. The oligonucleotide may include pyrimidines. Examples of pyrimidines include cytosine (C), thymine (T), or uracil (U), or modified versions thereof.

[0108] In some embodiments, purines of the oligonucleotide comprise 2′ fluoro modified purines. In some embodiments, purines of the oligonucleotide comprise 2′-O-methyl modified purines. In some embodiments, purines of the oligonucleotide comprise a mixture of 2′ fluoro and 2′-O-methyl modified purines. In some embodiments, all purines of the oligonucleotide comprise 2′ fluoro modified purines. In some embodiments, all purines of the oligonucleotide comprise 2′-O-methyl modified purines. In some embodiments, all purines of the oligonucleotide comprise a mixture of 2′ fluoro and 2′-O-methyl modified purines. 2′-O-methyl may include 2′ O-methyl.

[0109] In some embodiments, pyrimidines of the oligonucleotide comprise 2′ fluoro modified pyrimidines. In some embodiments, pyrimidines of the oligonucleotide comprise 2′-O-methyl modified pyrimidines. In some embodiments, pyrimidines of the oligonucleotide comprise a mixture of 2′ fluoro and 2′-O-methyl modified pyrimidines. In some embodiments, all pyrimidines of the oligonucleotide comprise 2′ fluoro modified pyrimidines. In some embodiments, all pyrimidines of the oligonucleotide comprise 2′-O-methyl modified pyrimidines. In some embodiments, all pyrimidines of the oligonucleotide comprise a mixture of 2′ fluoro and 2′-O-methyl modified pyrimidines.

[0110] In some embodiments, purines of the oligonucleotide comprise 2′ fluoro modified purines, and pyrimidines of the oligonucleotide comprise a mixture of 2′ fluoro and 2′-O-methyl modified pyrimidines. In some embodiments, purines of the oligonucleotide comprise 2′-O-methyl modified purines, and pyrimidines of the oligonucleotide comprise a mixture of 2′ fluoro and 2′-O-methyl modified pyrimidines. In some embodiments, purines of the oligonucleotide comprise 2′ fluoro modified purines, and pyrimidines of the oligonucleotide comprise 2′-O-methyl modified pyrimidines. In some embodiments, purines of the oligonucleotide comprise 2′-O-methyl modified purines, and pyrimidines of the oligonucleotide comprise 2′ fluoro modified pyrimidines. In some embodiments, pyrimidines of the oligonucleotide comprise 2′ fluoro modified pyrimidines, and purines of the oligonucleotide comprise a mixture of 2′ fluoro and 2′-O-methyl modified purines. In some embodiments, pyrimidines of the oligonucleotide comprise 2′-O-methyl modified pyrimidines, and purines of the oligonucleotide comprise a mixture of 2′ fluoro and 2′-O-methyl modified purines. In some embodiments, pyrimidines of the oligonucleotide comprise 2′ fluoro modified pyrimidines, and purines of the oligonucleotide comprise 2′-O-methyl modified purines. In some embodiments, pyrimidines of the oligonucleotide comprise 2′-O-methyl modified pyrimidines, and purines of the oligonucleotide comprise 2′ fluoro modified purines.

[0111] In some embodiments, all purines of the oligonucleotide comprise 2′ fluoro modified purines, and all pyrimidines of the oligonucleotide comprise a mixture of 2′ fluoro and 2′-O-methyl modified pyrimidines. In some embodiments, all purines of the oligonucleotide comprise 2′-O-methyl modified purines, and all pyrimidines of the oligonucleotide comprise a mixture of 2′ fluoro and 2′-O-methyl modified pyrimidines. In some embodiments, all purines of the oligonucleotide comprise 2′ fluoro modified purines, and all pyrimidines of the oligonucleotide comprise 2′-O-methyl modified pyrimidines. In some embodiments, all purines of the oligonucleotide comprise 2′-O-methyl modified purines, and all pyrimidines of the oligonucleotide comprise 2′ fluoro modified pyrimidines. In some embodiments, all pyrimidines of the oligonucleotide comprise 2′ fluoro modified pyrimidines, and all purines of the oligonucleotide comprise a mixture of 2′ fluoro and 2′-O-methyl modified purines. In some embodiments, all pyrimidines of the oligonucleotide comprise 2′-O-methyl modified pyrimidines, and all purines of the oligonucleotide comprise a mixture of 2′ fluoro and 2′-O-methyl modified purines. In some embodiments, all pyrimidines of the oligonucleotide comprise 2′ fluoro modified pyrimidines, and all purines of the oligonucleotide comprise 2′-O-methyl modified purines. In some embodiments, all pyrimidines of the oligonucleotide comprise 2′-O-methyl modified pyrimidines, and all purines of the oligonucleotide comprise 2′ fluoro modified purines.

[0112] In some cases, the oligonucleotide comprises a particular modification pattern. In some embodiments, position 9 counting from the 5′ end of the of a strand of the oligonucleotide may have a 2′F modification. In some embodiments, when position 9 of a strand of the oligonucleotide is a pyrimidine, then all purines in a strand of the oligonucleotide have a 2′OMe modification. In some embodiments, when position 9 is the only pyrimidine between positions 5 and 11 of the sense stand, then position 9 is the only position with a 2′F modification in a strand of the oligonucleotide. In some embodiments, when position 9 and only one other base between positions 5 and 11 of a strand of the oligonucleotide are pyrimidines, then both of these pyrimidines are the only two positions with a 2′F modification in a strand of the oligonucleotide. In some embodiments, when position 9 and only two other bases between positions 5 and 11 of a strand of the oligonucleotide are pyrimidines, and those two other pyrimidines are in adjacent positions so that there would be not three 2′F modifications in a row, then any combination of 2′F modifications can be made that give three 2′F modifications in total. In some embodiments, when there are more than 2 pyrimidines between positions 5 and 11 of a strand of the oligonucleotide, then all combinations of pyrimidines having the 2′F modification are allowed that have three to five 2′F modifications in total, provided that a strand of the oligonucleotide does not have three 2′F modifications in a row. In some cases, a strand of the oligonucleotide of any of the siRNAs comprises a modification pattern which conforms to any or all of these a strand of the oligonucleotide rules.

[0113] In some embodiments, when position 9 of a strand of the oligonucleotide is a purine, then all purines in a strand of the oligonucleotide have a 2′OMe modification. In some embodiments, when position 9 is the only purine between positions 5 and 11 of the sense stand, then position 9 is the only position with a 2′F modification in a strand of the oligonucleotide. In some embodiments, when position 9 and only one other base between positions 5 and 11 of a strand of the oligonucleotide are purines, then both of these purines are the only two positions with a 2′F modification in a strand of the oligonucleotide. In some embodiments, when position 9 and only two other bases between positions 5 and 11 of a strand of the oligonucleotide are purines, and those two other purines are in adjacent positions so that there would be not three 2′F modifications in a row, then any combination of 2′F modifications can be made that give three 2′F modifications in total. In some embodiments, when there are more than 2 purines between positions 5 and 11 of a strand of the oligonucleotide, then all combinations of purines having the 2′F modification are allowed that have three to five 2′F modifications in total, provided that a strand of the oligonucleotide does not have three 2′F modifications in a row. In some cases, a strand of the oligonucleotide of any of the siRNAs comprises a modification pattern which conforms to any or all of these a strand of the oligonucleotide rules.

[0114] In some cases, position 9 of a strand of the oligonucleotide can be a 2′deoxy. In these cases, 2′F and 2′OMe modifications may occur at the other positions of a strand of the oligonucleotide. In some cases, a strand of the oligonucleotide of any of the siRNAs comprises a modification pattern which conforms to these a strand of the oligonucleotide rules.

[0115] In some embodiments, position nine of the sense strand comprises a 2′ fluoro-modified pyrimidine. In some embodiments, all purines of the sense strand comprise 2′-O-methyl modified purines. In some embodiments, 1, 2, 3, 4, or 5 pyrimidines between positions 5 and 11 comprise a 2′flouro-modified pyrimidine, provided there are not three 2′ fluoro-modified pyrimidines in a row. In some embodiments, the odd-numbered positions of the antisense strand comprise 2′-O-methyl modified nucleotides. In some embodiments, the even-numbered positions of the antisense strand comprise 2′flouro-modified nucleotides and unmodified deoxyribonucleotide. In some embodiments, position nine of the sense strand comprises a 2′ fluoro-modified pyrimidine; all purines of the sense strand comprises 2′-O-methyl modified purines; 1, 2, 3, 4, or 5 pyrimidines between positions 5 and 11 comprise a 2′flouro-modified pyrimidine, provided there are not three 2′ fluoro-modified pyrimidines in a row; the odd-numbered positions of the antisense strand comprise 2′-O-methyl modified nucleotides; and the even-numbered positions of the antisense strand comprise 2′flouro-modified nucleotides and unmodified deoxyribonucleotides.

[0116] In some embodiments, position nine of the sense strand comprises a 2′ fluoro-modified purine. In some embodiments, all pyrimidines of the sense strand comprise 2′-O-methyl modified purines. In some embodiments, 1, 2, 3, 4, or 5 purines between positions 5 and 11 comprise a 2′flouro-modified purine, provided there are not three 2′ fluoro-modified purine in a row. In some embodiments, the odd-numbered positions of the antisense strand comprise 2′-O-methyl modified nucleotides. In some embodiments, the even-numbered positions of the antisense strand comprise 2′flouro-modified nucleotides and unmodified deoxyribonucleotide. In some embodiments, position nine of the sense strand comprises a 2′ fluoro-modified purine; all pyrimidine of the sense strand comprises 2′-O-methyl modified pyrimidines; 1, 2, 3, 4, or 5 purines between positions 5 and 11 comprise a 2′flouro-modified purines, provided there are not three 2′ fluoro-modified purines in a row; the odd-numbered positions of the antisense strand comprise 2′-O-methyl modified nucleotides; and the even-numbered positions of the antisense strand comprise 2′flouro-modified nucleotides and unmodified deoxyribonucleotides. In some embodiments, there are not three 2′ fluoro-modified purines in a row. In some embodiments, there are not three 2′ fluoro-modified pyrimidines in a row.

[0117] In some embodiments, position nine of the sense strand comprises an unmodified deoxyribonucleotide. In some embodiments, positions 5, 7, and 8 of the sense strand comprise 2′fluoro-modified nucleotides. In some embodiments, all pyrimidines in positions 10 to 21 of the sense strand comprise 2′-O-methyl modified pyrimidines and all purines in positions 10 to 21 of the comprise 2′-O-methyl modified purines or 2′fluoro-modified purines. In some embodiments, the odd-numbered positions of the antisense strand comprise 2′-O-methyl modified nucleotides. In some embodiments, the even-numbered positions of the antisense strand comprise 2′flouro-modified nucleotides and unmodified deoxyribonucleotides. In some embodiments, position nine of the sense strand comprises an unmodified deoxyribonucleotide; positions 5, 7, and 8 of the sense strand comprise 2′fluoro-modified nucleotides; all pyrimidines in positions 10 to 21 of the sense strand comprise 2′-O-methyl modified pyrimidines and all purines in positions 10 to 21 of the comprise 2′-O-methyl modified purines or 2′fluoro-modified purines; the odd-numbered positions of the antisense strand comprise 2′-O-methyl modified nucleotides; and the even-numbered positions of the antisense strand comprise 2′flouro-modified nucleotides and unmodified deoxyribonucleotides.

[0118] In some embodiments, position nine of the sense strand comprises an unmodified deoxyribonucleotide. In some embodiments, positions 5, 7, and 8 of the sense strand comprise 2′fluoro-modified nucleotides. In some embodiments, all purines in positions 10 to 21 of the sense strand comprise 2′-O-methyl modified purines and all pyrimidines in positions 10 to 21 of the comprise 2′-O-methyl modified pyrimidines or 2′fluoro-modified pyrimidines. In some embodiments, the odd-numbered positions of the antisense strand comprise 2′-O-methyl modified nucleotides. In some embodiments, the even-numbered positions of the antisense strand comprise 2′flouro-modified nucleotides and unmodified deoxyribonucleotides. In some embodiments, position nine of the sense strand comprises an unmodified deoxyribonucleotide; positions 5, 7, and 8 of the sense strand comprise 2′fluoro-modified nucleotides; all purines in positions 10 to 21 of the sense strand comprise 2′-O-methyl modified purines and all pyrimidines in positions 10 to 21 of the comprise 2′-O-methyl modified pyrimidines or 2′fluoro-modified pyrimidines; the odd-numbered positions of the antisense strand comprise 2′-O-methyl modified nucleotides; and the even-numbered positions of the antisense strand comprise 2′flouro-modified nucleotides and unmodified deoxyribonucleotide.

[0119] In some embodiments, the moiety includes a negatively charged group attached at a 5′ end of the oligonucleotide. This may be referred to as a 5′-end group. In some embodiments, the negatively charged group is attached at a 5′ end of an antisense strand of an siRNA disclosed herein. The 5′-end group may be or include a 5′-end phosphorothioate, 5′-end phosphorodithioate, 5′-end vinylphosphonate (5′-VP), 5′-end methylphosphonate, 5′-end cyclopropyl phosphonate, or a 5′-deoxy-5′-C-malonyl. The 5′-end group may comprise 5′-VP. In some embodiments, the 5′-VP comprises a trans-vinylphosphate or cis-vinylphosphate. The 5′-end group may include an extra 5′ phosphate. A combination of 5′-end groups may be used.

[0120] In some embodiments, the oligonucleotide includes a negatively charged group. The negatively charged group may aid in cell or tissue penetration. The negatively charged group may be attached at a 5′ or 3′ end (e.g. a 5′ end) of the oligonucleotide. This may be referred to as an end group. The end group may be or include a phosphorothioate, phosphorodithioate, vinylphosphonate, methylphosphonate, cyclopropyl phosphonate, or a deoxy-C-malonyl. The end group may include an extra 5′ phosphate such as an extra 5′ phosphate. A combination of end groups may be used.

[0121] In some embodiments, the oligonucleotide includes a phosphate mimic. In some embodiments, the phosphate mimic comprises vinyl phosphonate. In some embodiments, the vinyl phosphonate comprises a trans-vinylphosphate. In some embodiments, the vinyl phosphonate comprises a cis-vinylphosphate. An example of a nucleotide that includes a vinyl phosphonate is shown below.

[chemical structure]

5′ vinylphosphonate 2′ O Methyl Uridine

[0122] In some embodiments, the vinyl phosphonate increases the stability of the oligonucleotide. In some embodiments, the vinyl phosphonate increases the accumulation of the oligonucleotide in tissues. In some embodiments, the vinyl phosphonate protects the oligonucleotide from an exonuclease or a phosphatase. In some embodiments, the vinyl phosphonate improves the binding affinity of the oligonucleotide with the siRNA processing machinery.

[0123] In some embodiments, the oligonucleotide includes 1 vinyl phosphonate. In some embodiments, the oligonucleotide includes 2 vinyl phosphonates. In some embodiments, the oligonucleotide includes 3 vinyl phosphonates. In some embodiments, the oligonucleotide includes 4 vinyl phosphonates. In some embodiments, the antisense strand of the oligonucleotide comprises a vinyl phosphonate at the 5′ end. In some embodiments, the antisense strand of the oligonucleotide comprises a vinyl phosphonate at the 3′ end. In some embodiments, the sense strand of the oligonucleotide comprises a vinyl phosphonate at the 5′ end. In some embodiments, the sense strand of the oligonucleotide comprises a vinyl phosphonate at the 3′ end.

### 1. Hydrophobic Moieties

[0124] In some embodiments, the composition comprises an oligonucleotide that inhibits the expression of ANGPTL4, wherein the oligonucleotide comprises a hydrophobic moiety. The hydrophobic moiety may be attached at a 3′ or 5′ terminus of the oligonucleotide. The hydrophobic moiety may include a lipid such as a fatty acid. The hydrophobic moiety may include a hydrocarbon. The hydrocarbon may be linear. The hydrocarbon may be non-linear. The hydrophobic moiety may include a lipid moiety or a cholesterol moiety, or a combination thereof.

[0125] In some embodiments, the composition comprises an oligonucleotide that inhibits the expression of ANGPTL4, wherein the oligonucleotide comprises a lipid attached at a 3′ or 5′ terminus of the oligonucleotide. In some embodiments, the lipid comprises cholesterol, myristoyl, palmitoyl, stearoyl, lithocholoyl, docosanoyl, docosahexaenoyl, myristyl, palmityl, stearyl, or α-tocopherol, or a combination thereof.

[0126] In some embodiments, the composition comprises an oligonucleotide that inhibits the expression of ANGPTL4, wherein the oligonucleotide comprises a hydrophobic ligand or moiety. In some embodiments, the hydrophobic ligand or moiety comprises cholesterol. In some embodiments, the hydrophobic ligand or moiety comprises a cholesterol derivative. In some embodiments, the hydrophobic ligand or moiety is attached at a 3′ terminus of the oligonucleotide. In some embodiments, the hydrophobic ligand or moiety s attached at a 5′ terminus of the oligonucleotide. In some embodiments, the composition comprises a sense strand, and the hydrophobic ligand or moiety is attached to the sense strand (e.g. attached to a 5′ end of the sense strand, or attached to a 3′ end of the sense strand). In some embodiments, the composition comprises an antisense strand, and the hydrophobic ligand or moiety is attached to the antisense strand (e.g. attached to a 5′ end of the antisense strand, or attached to a 3′ end of the antisense strand). In some embodiments, the composition comprises a hydrophobic ligand or moiety attached at a 3′ or 5′ terminus of the oligonucleotide.

[0127] In some embodiments, a hydrophobic moiety is attached to the oligonucleotide (e.g. a sense strand and/or an antisense strand of a siRNA). In some embodiments, a hydrophobic moiety is attached at a 3′ terminus of the oligonucleotide. In some embodiments, a hydrophobic moiety is attached at a 5′ terminus of the oligonucleotide. In some embodiments, the hydrophobic moiety comprises cholesterol. In some embodiments, the hydrophobic moiety includes a cyclohexanyl.

[0128] In some embodiments, the composition comprises an oligonucleotide that inhibits the expression of ANGPTL4, wherein the oligonucleotide comprises a lipid attached at a 3′ or 5′ terminus of the oligonucleotide. In some embodiments, a lipid is attached at a 3′ terminus of the oligonucleotide. In some embodiments, a lipid is attached at a 5′ terminus of the oligonucleotide. In some embodiments, the lipid comprises cholesterol, myristoyl, palmitoyl, stearoyl, lithocholoyl, docosanoyl, docosahexaenoyl, myristyl, palmityl, stearyl, or α-tocopherol, or a combination thereof. In some embodiments, the lipid comprises stearyl, lithocholyl, docosanyl, docosahexaenyl, or myristyl. In some embodiments, the lipid comprises cholesterol. In some embodiments, the lipid includes a sterol such as cholesterol. In some embodiments, the lipid comprises stearyl, t-butylphenol, n-butylphenol, octylphenol, dodecylphenol, phenyl n-dodecyl, octadecylbenzamide, hexadecylbenzamide, or octadecylcyclohexyl. In some embodiments, the lipid comprises phenyl para C12.

[0129] In some embodiments, the oligonucleotide comprises any aspect of the following structure:

[chemical structure]

[0130] In some embodiments, the oligonucleotide comprises any aspect of the following structure:

[chemical structure]

[0131] In some embodiments, the oligonucleotide comprises any aspect of the following structure:

[chemical structure]

[0132] In some embodiments, the oligonucleotide comprises any aspect of the following structure: The aspect included in the oligonucleotide may include the entire structure, or may include the lipid moiety, of any of the structures shown. In some embodiments, n is 1-3. In some embodiments, n is 1. In some embodiments, n is 2. In some embodiments, n is 3. In some embodiments, R is an alkyl group. In some embodiments, the alkyl group contains 1, 2, 3, 4, 5, 6, 7, 8, 9, 10, 11, 12, 13, 14, 15, 16, 17, 18, 19, or 20 carbons. In some embodiments, the alkyl group contains 4, 5, 6, 7, 8, 9, 10, 11, 12, 13, 14, 15, 16, 17, or 18 carbons, or a range defined by any two of the aforementioned numbers of carbons. In some embodiments, the alkyl group contains 4-18 carbons. In some embodiments, the lipid moiety comprises an alcohol or ether.

[0133] In some embodiments, the lipid includes a fatty acid. In some embodiments, the lipid comprises a lipid depicted in Table 1. The example lipid moieties in Table 1 are shown attached at a 5′ end of an oligonucleotide, in which the 5′ terminal phosphate of the oligonucleotide is shown with the lipid moiety. In some embodiments, a lipid moiety in Table 1 may be attached at a different point of attachment than shown. For example, the point of attachment of any of the lipid moieties in the table may be at a 3′ oligonucleotide end. In some embodiments, the lipid is used for targeting the oligonucleotide to a non-hepatic cell or tissue.

TABLE 1
Hydrophobic moiety examples

| Hydrophobic | Hydrophobic | |
|---|---|---|
| Moiety Description | Moiety Name | Example Conjugation |
| stearyl | ETL3 | [chemical structure] |
| t-butylphenyl | ETL7 | [chemical structure] |
| n-butylphenyl | ETL8 | [chemical structure] |
| octylphenyl | ETL9 | [chemical structure] |
| dodecylphenyl | ETL10 | [chemical structure] |
| phenyl n-dodecyl | ETL12 | [chemical structure] |
| octadecylbenzamide | ETL13 | [chemical structure] |
| hexadecylbenzamide | ETL15 | [chemical structure] |
| octadecylcyclohexyl | ETL16 | [chemical structure] |

[0134] In some embodiments, the lipid or lipid moiety includes 16 to 18 carbons. In some embodiments, the lipid includes 16 carbons. In some embodiments, the lipid includes 17 carbons. In some embodiments, the lipid includes 18 carbons. In some embodiments, the lipid moiety includes 16 carbons. In some embodiments, the lipid moiety includes 17 carbons. In some embodiments, the lipid moiety includes 18 carbons.

[0135] The hydrophobic moiety may include a linker that comprises a carbocycle. The carbocycle may be six-membered. Some examples of a carbocycle include phenyl or cyclohexyl. The linker may include a phenyl. The linker may include a cyclohexyl. The lipid may be attached to the carbocycle, which may in turn be attached at a phosphate (e.g. 5′ or 3′ phosphate) of the oligonucleotide. In some embodiments, the lipid or hydrocarbon, and the end of the sense are connected to the phenyl or cyclohexyl linker in the 1,4; 1,3; or 1,2 substitution pattern (e.g. the para, meta, or ortho phenyl configuration). In some embodiments, the lipid or hydrocarbon, and the end of the sense are connected to the phenyl or cyclohexyl linker in the 1,4 substitution pattern (e.g. the para phenyl configuration). The lipid may be attached to the carbocycle in the 1,4 substitution pattern relative to the oligonucleotide. The lipid may be attached to the carbocycle in the 1,3 substitution pattern relative to the oligonucleotide. The lipid may be attached to the carbocycle in the 1,2 substitution pattern relative to the oligonucleotide. The lipid may be attached to the carbocycle in the ortho orientation relative to the oligonucleotide. The lipid may be attached to the carbocycle in the para orientation relative to the oligonucleotide. The lipid may be attached to the carbocycle in the meta orientation relative to the oligonucleotide.

[0136] The lipid moiety may comprise or consist of the following structure

[chemical structure]

[0137] In some embodiments, the lipid moiety comprises or consists of the following structure:

[chemical structure]

[0138] In some embodiments, the lipid moiety comprises the following structure:

[chemical structure]

[0139] In some embodiments, the lipid moiety comprises or consist of the following structure:

[chemical structure]

[0140] In some embodiments, the dotted line indicates a covalent connection. The covalent connection may between an end of the sense or antisense strand. For example, the connection may be to the 5′ end of the sense strand. In some embodiments, n is 0-3. In some embodiments, n is 1-3. In some embodiments, n is 0. In some embodiments, n is 1. In some embodiments, n is 2. In some embodiments, n is 3. In some embodiments, n is 4. In some embodiments, n is 5. In some embodiments, n is 1, 2, 3, 4, 5, 6, 7, 8, 9, or 10. In some embodiments, R is an alkyl group. In some embodiments, the alkyl group contains 1, 2, 3, 4, 5, 6, 7, 8, 9, 10, 11, 12, 13, 14, 15, 16, 17, 18, 19, or 20 carbons. In some embodiments, the alkyl group contains 4, 5, 6, 7, 8, 9, 10, 11, 12, 13, 14, 15, 16, 17, or 18 carbons, or a range defined by any two of the aforementioned numbers of carbons. In some embodiments, R comprises or consists of an alkyl group containing 4-18 carbons.

[0141] The lipid moiety may be attached at a 5′ end of the oligonucleotide. The 5′ end may have one phosphate linking the lipid moiety to a 5′ carbon of a sugar of the oligonucleotide. The 5′ end may have two phosphates linking the lipid moiety to a 5′ carbon of a sugar of the oligonucleotide. The 5′ end may have three phosphates linking the lipid moiety to a 5′ carbon of a sugar of the oligonucleotide. The 5′ end may have one phosphate connected to the 5′ carbon of a sugar of the oligonucleotide, where the one phosphate is connected to the lipid moiety. The 5′ end may have two phosphates connected to the 5′ carbon of a sugar of the oligonucleotide, where the one of the two phosphates is connected to the lipid moiety. The 5′ end may have three phosphates connected to the 5′ carbon of a sugar of the oligonucleotide, where the one of the three phosphates is connected to the lipid moiety. The sugar may include a ribose. The sugar may include a deoxyribose. The sugar may be modified a such as a 2′ modified sugar (e.g. a 2′ O-methyl or 2′ fluoro ribose). A phosphate of the 5′ end may include a modification such as a sulfur in place of an oxygen. Two phosphates of the 5′ end may include a modification such as a sulfur in place of an oxygen. Three phosphates of the 5′ end may include a modification such as a sulfur in place of an oxygen.

[0142] In some embodiments, the oligonucleotide includes 1 lipid moiety. In some embodiments, the oligonucleotide includes 2 lipid moieties. In some embodiments, the oligonucleotide includes 3 lipid moieties. In some embodiments, the oligonucleotide includes 4 lipid moieties.

[0143] Some embodiments relate to a method of making an oligonucleotide comprising a hydrophobic conjugate. A strategy for making hydrophobic conjugates may include use of a phosphoramidite reagent based upon a 6-membered ring alcohol such as a phenol or cyclohexanol. The phosphoramidite may be reacted to a nucleotide to connect the nucleotide to the hydrophobic moiety, and thereby produce the hydrophobic conjugate. Some examples of phosphoramidite reagents that may be used to produce a hydrophobic conjugate are provided as follows:

[chemical structure]

[0144] In some embodiments, n is 1-3. In some embodiments, n is 1. In some embodiments, n is 2. In some embodiments, n is 3. In some embodiments, R is an alkyl group. In some embodiments, the alkyl group contains 1, 2, 3, 4, 5, 6, 7, 8, 9, 10, 11, 12, 13, 14, 15, 16, 17, 18, 19, or 20 carbons. In some embodiments, the alkyl group contains 4, 5, 6, 7, 8, 9, 10, 11, 12, 13, 14, 15, 16, 17, or 18 carbons, or a range defined by any two of the aforementioned numbers of carbons. In some embodiments, R comprises or consists of an alkyl group containing 4-18 carbons. Any one of the phosphoramidite reagents may be reacted to a 5′ end of an oligonucleotide to produce an oligonucleotide comprising a hydrophobic moiety. In some embodiments, the phosphoramidite reagents is reacted to a 5′ end of a sense strand of an siRNA. The sense strand may then be hybridized to an antisense strand to form a duplex. The hybridization may be performed by incubating the sense and antisense strands in solution at a given temperature. The temperature may be gradually reduced. The temperature may comprise or include a temperature comprising an annealing temperature for the sense and antisense strands. The temperature may be below or include a temperature below the annealing temperature for the sense and antisense strands. The temperature may be below a melting temperature of the sense and antisense strands.

[0145] The lipid may be attached to the oligonucleotide by a linker. The linker may include a polyethyleneglycol (e.g. tetraethyleneglycol).

[0146] The modifications described herein may be useful for delivery to a cell or tissue, for example, extrahepatic delivery or targeting of an oligonucleotide composition. The modifications described herein may be useful for targeting an oligonucleotide composition to a cell or tissue.

### 2. Sugar Moieties

[0147] In some embodiments, the composition comprises an oligonucleotide that inhibits the expression of ANGPTL4, wherein the oligonucleotide comprises a sugar moiety. The sugar moiety may include an N-acetyl galactose moiety (e.g. an N-acetylgalactosamine (GalNAc) moiety), an N-acetyl glucose moiety (e.g. an N-acetylglucosamine (GlcNAc) moiety), a fucose moiety, or a mannose moiety. The sugar moiety may include 1, 2, 3, or more sugar molecules. The sugar moiety may be attached at a 3′ or 5′ terminus of the oligonucleotide. The sugar moiety may include an N-acetyl galactose moiety. The sugar moiety may include an N-acetylgalactosamine (GalNAc) moiety. The sugar moiety may include an N-acetyl glucose moiety. The sugar moiety may include N-acetylglucosamine (GlcNAc) moiety. The sugar moiety may include a fucose moiety. The sugar moiety may include a mannose moiety. N-acetyl glucose, GlcNAc, fucose, or mannose may be useful for targeting macrophages when they target or bind a mannose receptor such as CD206. The sugar moiety may be useful for binding or targeting an asialoglycoprotein receptor such as an asialoglycoprotein receptor of a hepatocyte. The GalNAc moiety may bind to an asialoglycoprotein receptor. The GalNAc moiety may target a hepatocyte.

[0148] In some embodiments, the composition comprises an oligonucleotide that inhibits the expression of ANGPTL4, wherein the oligonucleotide comprises an N-acetylgalactosamine (GalNAc) ligand for hepatocyte targeting. A “GalNAc ligand” may be refer to a ligand for an asialoglycoprotein receptor (e.g. on a hepatocyte) that comprises one or more GalNAc moieties. The GalNAc ligand may bind an asialoglycoprotein receptor (e.g. on a hepatocyte). The GalNAc ligand may comprise one or more GalNAc moieties. An example of a GalNAc moiety includes GalNAc attached to a linker. The GalNAc moiety may include 1, 2, 3, or more GalNAc molecules. The GalNAc ligand may comprise 3 GalNAc moieties. The GalNAc ligand may comprise 1, 2, 3, 4, 5, 6, 7, 8, 9, or 10, or more GalNAc moieties.

[0149] The GalNAc ligand may be conjugated to the oligonucleotide. The GalNAc ligand may be conjugated to a 5′ end of the oligonucleotide. The GalNAc ligand may be conjugated to a 3′ end of the oligonucleotide. A first GalNAc ligand may be conjugated to a 5′ end of the oligonucleotide, and a second GalNAc ligand may be conjugated to 3′ end of the oligonucleotide. The GalNAc ligand may be conjugated to a 3′ or 5′ end of an ASO. The GalNAc ligand may be conjugated to a 3′ or 5′ end of a sense strand of an siRNA. The GalNAc ligand may be conjugated to a 3′ end of a sense strand of an siRNA. The GalNAc ligand may be conjugated to a 5′ end of a sense strand of an siRNA. The GalNAc ligand may be conjugated to a 3′ or 5′ end of an antisense strand of an siRNA. The GalNAc ligand may be conjugated to a 3′ end of an antisense strand of an siRNA. The GalNAc ligand may be conjugated to a 5′ end of an antisense strand of an siRNA. A first GalNAc ligand may be conjugated to a sense strand of an siRNA, and a second GalNAc ligand may be conjugated to an antisense strand of the siRNA.

[0150] In some embodiments, the composition comprises an oligonucleotide that inhibits the expression of ANGPTL4, wherein the oligonucleotide comprises an N-acetylgalactosamine (GalNAc) moiety. GalNAc may be useful for hepatocyte targeting. The GalNAc moiety may include a bivalent or trivalent branched linker. The oligo may be attached to 1, 2 or 3 GalNAcs through a bivalent or trivalent branched linker. The GalNAc moiety may include 1, 2, 3, or more GalNAc molecules. The GalNAc moiety may be attached at a 3′ or 5′ terminus of the oligonucleotide.

[0151] In some embodiments, the composition comprises an oligonucleotide that inhibits the expression of ANGPTL4, wherein the oligonucleotide comprises an N-acetylgalactosamine (GalNAc) ligand for hepatocyte targeting. In some embodiments, the composition comprises GalNAc. In some embodiments, the composition comprises a GalNAc derivative. In some embodiments, the GalNAc ligand is attached at a 3′ terminus of the oligonucleotide. In some embodiments, the GalNAc ligand is attached at a 5′ terminus of the oligonucleotide. In some embodiments, the composition comprises a sense strand, and the GalNAc ligand is attached to the sense strand (e.g. attached to a 5′ end of the sense strand, or attached to a 3′ end of the sense strand). In some embodiments, the composition comprises an antisense strand, and the GalNAc ligand is attached to the antisense strand (e.g. attached to a 5′ end of the antisense strand, or attached to a 3′ end of the antisense strand). In some embodiments, the composition comprises a GalNAc ligand attached at a 3′ or 5′ terminus of the oligonucleotide.

[0152] Disclosed herein, in some embodiments, are compositions comprising an oligonucleotide that inhibits the expression of ANGPTL4, wherein the oligonucleotide comprises a GalNAc moiety. The GalNAc moiety may be included in any formula, structure, or GalNAc moiety shown below. In some embodiments, described herein is a compound (e.g. oligonucleotide) represented by Formula (I) or (II):

[chemical structure]

or a salt thereof, wherein
[0153] J is an oligonucleotide;
[0154] each w is independently selected from any value from 1 to 20;
[0155] each v is independently selected from any value from 1 to 20;
[0156] n is selected from any value from 1 to 20;
[0157] m is selected from any value from 1 to 20;
[0158] z is selected from any value from 1 to 3, wherein
   [0159] if z is 3, Y is C
   [0160] if z is 2, Y is CR⁶, or
   [0161] if z is 1, Y is C(R⁶)₂;
[0162] Q is selected from:
   [0163] C₃₋₁₀ carbocycle optionally substituted with one or more substituents independently selected from halogen, —CN, —NO₂, —OR⁷, —SR⁷, —N(R⁷)₂, —C(O)R⁷, —C(O)N(R⁷)₂, —N(R⁷)C(O)R⁷, —N(R⁷)C(O)N(R⁷)₂, —OC(O)N(R⁷)₂, —N(R⁷)C(O)OR⁷, —C(O)OR⁷, —OC(O)R⁷, —S(O)R⁷, and C₁₋₆ alkyl, wherein the C₁₋₆ alkyl, is optionally substituted with one or more substituents independently selected from halogen, —CN, —OH, —SH, —NO₂, and —NH₂;
[0164] R¹ is a linker selected from:
   [0165] —O—, —S—, —N(R⁷)—, —C(O)—, —C(O)N(R⁷)—, —N(R⁷)C(O)—, —N(R⁷)C(O)N(R⁷)—, —OC(O)N(R⁷)—, —N(R⁷)C(O)O—, —C(O)O—, —OC(O)—, —S(O)—, —S(O)₂—, —OS(O)₂—, —OP(O)(OR⁷)O—, —SP(O)(OR⁷)O—, —OP(S)(OR⁷)O—, —OP(O)(SR⁷)O—, —OP(O)(OR⁷)S—, —OP(O)(O⁻)O—, —SP(O)(O⁻)O—, —OP(S)(O⁻)O—, —OP(O)(S⁻)O—, —OP(O)(O⁻)S—, —OP(O)(OR⁷)NR⁷—, —OP(O)(N(R⁷)₂)NR⁷—, —OP(OR⁷)O—, —OP(N(R⁷)₂)O—, —OP(OR⁷)N(R⁷)—, and —OPN(R⁷)₂NR⁷—;
[0166] each R² is independently selected from:
   [0167] C₁₋₆ alkyl optionally substituted with one or more substituents independently selected from halogen, —OR⁷, —SR⁷, —N(R⁷)₂, —C(O)R⁷, —C(O)N(R⁷)₂, —N(R⁷)C(O)R⁷, —N(R⁷)C(O)N(R⁷)₂, —OC(O)N(R⁷)₂, —N(R⁷)C(O)OR⁷, —C(O)OR⁷, —OC(O)R⁷, and —S(O)R⁷;
[0168] R³ and R⁴ are each independently selected from:
   [0169] —OR⁷, —SR⁷, —N(R⁷)₂, —C(O)R⁷, —C(O)N(R⁷)₂, —N(R⁷)C(O)R⁷, —N(R⁷)C(O)N(R⁷)₂, —OC(O)N(R⁷)₂, —N(R⁷)C(O)OR⁷, —C(O)OR⁷, —OC(O)R⁷, and —S(O)R⁷;
[0170] each R⁵ is independently selected from:
   [0171] —OC(O)R⁷, —OC(O)N(R⁷)₂, —N(R⁷)C(O)R⁷, —N(R⁷)C(O)N(R⁷)₂, —N(R⁷)C(O)OR⁷, —C(O)R⁷, —C(O)OR⁷, and —C(O)N(R⁷)₂;
[0172] each R⁶ is independently selected from:
   [0173] hydrogen;
   [0174] halogen, —CN, —NO₂, —OR⁷, —SR⁷, —N(R⁷)₂, —C(O)R⁷, —C(O)N(R⁷)₂, —N(R⁷)C(O)R⁷, —N(R⁷)C(O)N(R⁷)₂, —OC(O)N(R⁷)₂, —N(R⁷)C(O)OR⁷, —C(O)OR⁷, —OC(O)R⁷, and —S(O)R⁷; and
   [0175] C₁₋₆ alkyl optionally substituted with one or more substituents independently selected from halogen, —CN, —NO₂, —OR⁷, —SR⁷, —N(R⁷)₂, —C(O)R⁷, —C(O)N(R⁷)₂, —N(R⁷)C(O)R⁷, —N(R⁷)C(O)N(R⁷)₂, —OC(O)N(R⁷)₂, —N(R⁷)C(O)OR⁷, —C(O)OR⁷, —OC(O)R⁷, and —S(O)R⁷;
[0176] each R⁷ is independently selected from:
   [0177] hydrogen;
   [0178] C₁₋₆ alkyl, C₂₋₆ alkenyl, and C₂₋₆ alkynyl, each of which is optionally substituted with one or more substituents independently selected from halogen, —CN, —OH, —SH, —NO₂, —NH₂, ═O, ═S, —O—C₁₋₆ alkyl, —S—C₁₋₆ alkyl, —N(C₁₋₆ alkyl)₂, —NH(C₁₋₆ alkyl), C₃₋₁₀ carbocycle, and 3- to 10-membered heterocycle; and
   [0179] C₃₋₁₀ carbocycle, and 3- to 10-membered heterocycle, each of which is optionally substituted with one or more substituents independently selected from halogen, —CN, —OH, —SH, —NO₂, —NH₂, ═O, ═S, —O—C₁₋₆ alkyl, —S—C₁₋₆ alkyl, —N(C₁₋₆ alkyl)₂, —NH(C₁₋₆ alkyl), C₁₋₆ alkyl, C₂₋₆ alkenyl, C₂₋₆ alkynyl, C₃₋₁₀ carbocycle, 3- to 10-membered heterocycle, and C₁₋₆ haloalkyl.
      In some embodiments, each w is independently selected from any value from 1 to 10. In some embodiments, each w is independently selected from any value from 1 to 5. In some embodiments, each w is 1. In some embodiments, each v is independently selected from any value from 1 to 10. In some embodiments, each v is independently selected from any value from 1 to 5. In some embodiments, each v is 1. In some embodiments, n is selected from any value from 1 to 10. In some embodiments, n is selected from any value from 1 to 5. In some embodiments, n is 2. In some embodiments, m is selected from any value from 1 to 10. In some embodiments, m is selected from any value from 1 to 5. In some embodiments, m is selected from 1 and 2. In some embodiments, z is 3 and Y is C. In some embodiments, Q is selected from C₅₋₆ carbocycle optionally substituted with one or more substituents independently selected from halogen, —CN, —NO₂, —OR⁷, —SR⁷, —N(R⁷)₂, —C(O)R⁷, —C(O)N(R⁷)₂, —N(R⁷)C(O)R⁷, —N(R⁷)C(O)N(R⁷)₂, —OC(O)N(R⁷)₂, —N(R⁷)C(O)OR⁷, —C(O)OR⁷, —OC(O)R⁷, and —S(O)R⁷. In some embodiments, Q is selected from C₅₋₆ carbocycle optionally substituted with one or more substituents independently selected from halogen, —CN, —OH, —SH, —NO₂, and —NH₂. In some embodiments, Q is selected from phenyl and cyclohexyl, each of which is optionally substituted with one or more substituents independently selected from halogen, —CN, —OH, —SH, —NO₂, and —NH₂. In some embodiments, Q is selected from phenyl. In some embodiments, Q is selected from cyclohexyl. In some embodiments, R¹ is selected from —OP(O)(OR⁷)O—, —SP(O)(OR⁷)O—, —OP(S)(OR⁷)O—, —OP(O)(SR⁷)O—, —OP(O)(OR⁷)S—, —OP(O)(O⁻)O—, —SP(O)(O⁻)O—, —OP(S)(O⁻)O—, —OP(O)(S⁻)O—, —OP(O)(O⁻)S—, —OP(O)(OR⁷)NR⁷—, —OP(O)(N(R⁷)₂)NR⁷—, —OP(OR⁷)O—, —OP(N(R⁷)₂)O—, —OP(OR⁷)N(R⁷)—, and —OPN(R⁷)₂—NR⁷. In some embodiments, R¹ is selected from —OP(O)(OR⁷)O—, —SP(O)(OR⁷)O—, —OP(S)(OR⁷)O—, —OP(O)(SR⁷)O—, —OP(O)(OR⁷)S—, —OP(O)(O⁻)O—, —SP(O)(O⁻)O—, —OP(S)(O⁻)O—, —OP(O)(S⁻)O—, —OP(O)(O⁻)S—, and —OP(OR⁷)O—. In some embodiments, R¹ is selected from —OP(O)(OR⁷)O—, —OP(S)(OR⁷)O—, —OP(O)(O⁻)O—, —OP(S)(O⁻)O—, —OP(O)(S⁻)O—, and —OP(OR⁷)O—. In some embodiments, R¹ is selected from —OP(O)(OR⁷)O— and —OP(OR⁷)O—. In some embodiments, R² is selected from C₁₋₃ alkyl substituted with one or more substituents independently selected from halogen, —OR⁷, —OC(O)R⁷, —SR⁷, —N(R⁷)₂, —C(O)R⁷, and —S(O)R⁷. In some embodiments, R² is selected from C₁₋₃ alkyl substituted with one or more substituents independently selected from —OR⁷, —OC(O)R⁷, —SR⁷, and —N(R⁷)₂. In some embodiments, R² is selected from C₁₋₃ alkyl substituted with one or more substituents independently selected from —OR⁷ and —OC(O)R⁷. In some embodiments, R³ is selected from halogen, —OR⁷, —SR⁷, —N(R⁷)₂, —C(O)R⁷, —OC(O)R⁷, and —S(O)R⁷. In some embodiments, R³ is selected from —OR⁷—SR⁷, —OC(O)R⁷, and —N(R⁷)₂. In some embodiments, R³ is selected from —OR⁷— and —OC(O)R⁷. In some embodiments, R⁴ is selected from halogen, —OR⁷, —SR⁷, —N(R⁷)₂, —C(O)R⁷, —OC(O)R⁷, and —S(O)R⁷. In some embodiments, R⁴ is selected from —OR⁷—SR⁷, —OC(O)R⁷, and —N(R⁷)₂. In some embodiments, R⁴ is selected from —OR⁷— and —OC(O)R⁷. In some embodiments, R⁵ is selected from —OC(O)R⁷, —OC(O)N(R⁷)₂, —N(R⁷)C(O)R⁷, —N(R⁷)C(O)N(R⁷)₂, and —N(R⁷)C(O)OR⁷. In some embodiments, R⁵ is selected from —OC(O)R⁷ and —N(R⁷)C(O)R⁷. In some embodiments, each R⁷ is independently selected from: hydrogen; and C₁₋₆ alkyl optionally substituted with one or more substituents independently selected from halogen, —CN, —OH, —SH, —NO₂, —NH₂, ═O, ═S, —O—C₁₋₆ alkyl, —S—C₁₋₆ alkyl, —N(C₁₋₆ alkyl)₂, —NH(C₁₋₆ alkyl), C₃₋₁₀ carbocycle, or 3- to 10-membered heterocycle. In some embodiments, each R⁷ is independently selected from C₁₋₆ alkyl optionally substituted with one or more substituents independently selected from halogen, —CN, —OH, —SH, —NO₂, —NH₂, ═O, ═S, —O—C₁₋₆ alkyl, —S—C₁₋₆ alkyl, —N(C₁₋₆ alkyl)₂, and —NH(C₁₋₆ alkyl). In some embodiments, each R⁷ is independently selected from C₁₋₆ alkyl optionally substituted with one or more substituents independently selected from halogen, —CN, —OH, and —SH. In some embodiments, w is 1; v is 1; n is 2; m is 1 or 2; z is 3 and Y is C; Q is phenyl or cyclohexyl, each of which is optionally substituted with one or more substituents independently selected from halogen, —CN, —OH, —SH, —NO₂, —NH₂, and C₁₋₃ alkyl; R¹ is selected from —OP(O)(OR⁷)O—, —OP(S)(OR⁷)O—, —OP(O)(O⁻)O—, —OP(S)(O⁻)O—, —OP(O)(S⁻)O—, and —OP(OR⁷)O—; R² is C₁ alkyl substituted with —OH or —OC(O)CH₃;
[0180] R³ is —OH or —OC(O)CH₃; R⁴ is —OH or —OC(O)CH₃; and R⁵ is —NH(O)CH₃. In some embodiments, the compound comprises:

[chemical structure]

[chemical structure]

[chemical structure]

[chemical structure]

[chemical structure]

[chemical structure]

[chemical structure]

[chemical structure]

[chemical structure]

[chemical structure]

[chemical structure]

[chemical structure]

[chemical structure]

[chemical structure]

[chemical structure]

[chemical structure]

[0181] In some embodiments, the oligonucleotide (J) is attached at a 5′ end or a 3′ end of the oligonucleotide. In some embodiments, the oligonucleotide comprises DNA. In some embodiments, the oligonucleotide comprises RNA. In some embodiments, the oligonucleotide comprises one or more modified internucleoside linkages. In some embodiments, the one or more modified internucleoside linkages comprise alkylphosphonate, phosphorothioate, methylphosphonate, phosphorodithioate, alkylphosphonothioate, phosphoramidate, carbamate, carbonate, phosphate triester, acetamidate, or carboxymethyl ester, or a combination thereof. In some embodiments, the oligonucleotide comprises 1, 2, 3, 4, 5, 6, 7, 8, 9, 10, 11, 12, 13, 14, 15, 16, 17, 18, 19, or 20 modified internucleoside linkages. In some embodiments, the compound binds to an asialoglycoprotein receptor. In some embodiments, the compound targets a hepatocyte.

[0182] Some embodiments include the following, where J is the oligonucleotide:

[chemical structure]

J may include one or more additional phosphates, or one or more phosphorothioates linking to the oligonucleotide. J may include one or more additional phosphates linking to the oligonucleotide. J may include one or more phosphorothioates linking to the oligonucleotide.

[0183] Some embodiments include the following, where J is the oligonucleotide:

[chemical structure]

J may include one or more additional phosphates, or one or more phosphorothioates linking to the oligonucleotide. J may include one or more additional phosphates linking to the oligonucleotide. J may include one or more phosphorothioates linking to the oligonucleotide.

[0184] Some embodiments include the following, where J is the oligonucleotide:

[chemical structure]

J may include one or more phosphates or phosphorothioates linking to the oligonucleotide. J may include one or more phosphates linking to the oligonucleotide. J may include a phosphate linking to the oligonucleotide. J may include one or more phosphorothioates linking to the oligonucleotide. J may include a phosphorothioate linking to the oligonucleotide.

[0185] Some embodiments include the following, where J is the oligonucleotide:

[chemical structure]

The structure in this compound attached to the oligonucleotide (J) may be referred to as “ETL17,” and is an example of a GalNAc moiety. J may include one or more phosphates or phosphorothioates linking to the oligonucleotide. J may include one or more phosphates linking to the oligonucleotide. J may include a phosphate linking to the oligonucleotide. J may include one or more phosphorothioates linking to the oligonucleotide. J may include a phosphorothioate linking to the oligonucleotide.

[0186] Some embodiments include the following, where the phosphate or “5′” indicates a connection to the oligonucleotide:

[chemical structure]

[0187] Some embodiments include the following, where the phosphate or “5′” indicates a connection to the oligonucleotide:

[chemical structure]

[0188] Some embodiments include the following, where J is the oligonucleotide:

[chemical structure]

include one or more phosphates or phosphorothioates linking to the oligonucleotide. J may include one or more phosphates linking to the oligonucleotide. J may include a phosphate linking to the oligonucleotide. J may include one or more phosphorothioates linking to the oligonucleotide. J may include a phosphorothioate linking to the oligonucleotide.

[0189] Some embodiments include the following, where J is the oligonucleotide:

[chemical structure]

The structure in this compound attached to the oligonucleotide (J) may be referred to as “ETLh1,” and is an example of a GalNAc moiety. J may include one or more phosphates or phosphorothioates linking to the oligonucleotide. J may include one or more phosphates linking to the oligonucleotide. J may include a phosphate linking to the oligonucleotide. J may include one or more phosphorothioates linking to the oligonucleotide. J may include a phosphorothioate linking to the oligonucleotide.
3. siRNA Modification Patterns

[0190] In some embodiments, the sense strand comprises 1, 2, 3, 4, 5, 6, 7, 8, 9, 10, 11, 12, 13, 14, 15, 16, 17, 18, 19, 20, 21, 22, 23, 24, 25, 26, 27, 28, or 29 modified internucleoside linkages, or a range of modified internucleoside linkages defined by any two of the aforementioned integers. In some embodiments, the sense strand comprises 1-11 modified internucleoside linkages. In some embodiments, the sense strand comprises 2-6 modified internucleoside linkages. In some embodiments, the sense strand comprises 5 modified internucleoside linkages. In some embodiments, the sense strand comprises 4 modified internucleoside linkages.

[0191] In some embodiments, the antisense strand comprises 1, 2, 3, 4, 5, 6, 7, 8, 9, 10, 11, 12, 13, 14, 15, 16, 17, 18, 19, 20, 21, 22, 23, 24, 25, 26, 27, 28, or 29 modified internucleoside linkages, or a range of modified internucleoside linkages defined by any two of the aforementioned integers. In some embodiments, the antisense strand comprises 1-11 modified internucleoside linkages. In some embodiments, the antisense strand comprises 2-6 modified internucleoside linkages. In some embodiments, the antisense strand comprises 5 modified internucleoside linkages. In some embodiments, the antisense strand comprises 4 modified internucleoside linkages.

[0192] In some embodiments, the sense strand comprises 1, 2, 3, 4, 5, 6, 7, 8, 9, 10, 11, 12, 13, 14, 15, 16, 17, 18, 19, 20, 21, 22, 23, 24, 25, 26, 27, 28, 29 or 30 modified nucleosides, or a range of modified nucleosides defined by any two of the aforementioned integers. In some embodiments, the sense strand comprises 12-19 modified nucleosides. In some embodiments, the sense strand comprises 12-21 modified nucleosides. In some embodiments, the sense strand comprises 19 modified nucleosides. In some embodiments, the sense strand comprises 21 modified nucleosides.

[0193] In some embodiments, the antisense strand comprises 1, 2, 3, 4, 5, 6, 7, 8, 9, 10, 11, 12, 13, 14, 15, 16, 17, 18, 19, 20, 21, 22, 23, 24, 25, 26, 27, 28, 29 or 30 modified nucleosides, or a range of modified nucleosides defined by any two of the aforementioned integers. In some embodiments, the antisense strand comprises 12-19 modified nucleosides. In some embodiments, the antisense strand comprises 12-21 modified nucleosides. In some embodiments, the antisense strand comprises 19 modified nucleosides. In some embodiments, the antisense strand comprises 21 modified nucleosides.

[0194] In some embodiments, the sense strand or the antisense strand further comprises at least 2 additional nucleosides attached to a 3′ terminus of the sense strand or the antisense strand. In some embodiments, the sense strand or the antisense strand comprises 2 additional nucleosides attached to a 3′ terminus of the sense strand or the antisense strand. As part of the sense strand, the additional nucleosides may or may not be complementary to an ANGPTL4 mRNA. The additional nucleosides of the antisense strand may include a uracil. The 2 additional nucleosides of the antisense strand may both include uracil.

[0195] In some embodiments, the sense strand or the sense strand further comprises at least 2 additional nucleosides attached to a 3′ terminus of the sense strand or the sense strand. In some embodiments, the sense strand or the sense strand comprises 2 additional nucleosides attached to a 3′ terminus of the sense strand or the sense strand. The additional nucleosides of the sense strand may include a uracil. The 2 additional nucleosides of the sense strand may both include uracil.

[0196] In some embodiments, the composition comprises an oligonucleotide that inhibits the expression of ANGPTL4 wherein the oligonucleotide comprises an siRNA comprising a sense strand and an antisense strand, wherein the sense strand comprises modification pattern 1S: 5′-NfsnsNfnNfnNfNfNfnNfnNfnNfnNfnNfsnsn-3′ (SEQ ID NO: 13954), wherein “Nf” is a 2′ fluoro-modified nucleoside, “n” is a 2′ O-methyl modified nucleoside, and “s” is a phosphorothioate linkage. In some embodiments, the sense strand comprises modification pattern 2S: 5′-nsnsnnNfnNfNfNfnnnnnnnnnnsnsn-3′ (SEQ ID NO: 13955), wherein “Nf” is a 2′ fluoro-modified nucleoside, “n” is a 2′ O-methyl modified nucleoside, and “s” is a phosphorothioate linkage. In some embodiments, the sense strand comprises modification pattern 3S: 5′-nsnsnnNfnNfnNfnnnnnnnnnnsnsn-3′ (SEQ ID NO: 13956), wherein “Nf” is a 2′ fluoro-modified nucleoside, “n” is a 2′ O-methyl modified nucleoside, and “s” is a phosphorothioate linkage. In some embodiments, the sense strand comprises modification pattern 4S: 5′-NfsnsNfnNfnNfNfNfnNfnNfnNfnNfnNfsnsnN-3′ (SEQ ID NO: 13957), wherein “Nf” is a 2′ fluoro-modified nucleoside, “n” is a 2′ O-methyl modified nucleoside, “s” is a phosphorothioate linkage, and N comprises one or more nucleosides. In some embodiments, the sense strand comprises modification pattern 5S: 5′-nsnsnnNfnNfNfNfnnnnnnnnnnsnsnN-3′ (SEQ ID NO: 13958), wherein “Nf” is a 2′ fluoro-modified nucleoside, “n” is a 2′ O-methyl modified nucleoside, “s” is a phosphorothioate linkage, and N comprises one or more nucleosides. In some embodiments, modification pattern 4S or 5S includes a moiety such as a lipid moiety or a sugar moiety. In some embodiments, the sense strand comprises modification pattern 6S: 5′-NfsnsNfnNfnNfnNfnNfnNfnNfnNfnNfsnsn-3′ (SEQ ID NO: 13959), wherein “Nf” is a 2′ fluoro-modified nucleoside, “n” is a 2′ O-methyl modified nucleoside, “s” is a phosphorothioate linkage, and N comprises one or more nucleosides. Any one of modification patterns 1S-9S may include a GalNAc ligand attached to the 3′ end. Any one of modification patterns 1S-9S may include a GalNAc ligand attached to the 5′ end. In some embodiments, the sense strand comprises modification pattern 7S: 5′-nsnsnnNfNfNfNfNfnnnnnnnnnnsnsn-3′ (SEQ ID NO: 14293), wherein “Nf” is a 2′ fluoro-modified nucleoside, “n” is a 2′ O-methyl modified nucleoside, and “s” is a phosphorothioate linkage. In some embodiments, the sense strand comprises modification pattern 8S: 5′-nsnsnnnNfNfNfNfnnnnnnnnnnsnsn-3′ (SEQ ID NO: 14294), wherein “Nf” is a 2′ fluoro-modified nucleoside, “n” is a 2′ O-methyl modified nucleoside, and “s” is a phosphorothioate linkage. In some embodiments, the sense strand comprises modification pattern 9S: 5′-nsnsnnnnNfNfNfNfnnnnnnnnnsnsn-3′ (SEQ ID NO: 14295), wherein “Nf” is a 2′ fluoro-modified nucleoside, “n” is a 2′ O-methyl modified nucleoside, and “s” is a phosphorothioate linkage. In some embodiments, the sense strand comprises modification pattern 10S: 5′-snnnnNfNfnNfNfnnnnnnnnnnsnsn-3′ (SEQ ID NO: 14322), wherein “Nf” is a 2′ fluoro-modified nucleoside, “n” is a 2′ O-methyl modified nucleoside, and “s” is a phosphorothioate linkage. In some embodiments, the sense strand comprises modification pattern 11S: 5′-snnnnNfNfnNfNfnNfnnnnnnnnsnsn-3′ (SEQ ID NO: 14323), wherein “Nf” is a 2′ fluoro-modified nucleoside, “n” is a 2′ O-methyl modified nucleoside, and “s” is a phosphorothioate linkage. In some embodiments, the sense strand comprises modification pattern 12S: 5′-snnnnnnNfnNfnnnnnnnnnnsnsn-3′ (SEQ ID NO: 14324), wherein “Nf” is a 2′ fluoro-modified nucleoside, “n” is a 2′ O-methyl modified nucleoside, and “s” is a phosphorothioate linkage. In some embodiments, the sense strand comprises modification pattern 13S: 5′-snnnnnNfNfnNfnNfnnnnnnnnsnsn-3′ (SEQ ID NO: 14325), wherein “Nf” is a 2′ fluoro-modified nucleoside, “n” is a 2′ O-methyl modified nucleoside, and “s” is a phosphorothioate linkage. In some embodiments, the sense strand comprises modification pattern 14S: 5′-snnnnnNfNfNfNfnnnnnnnnnnsnsn-3′ (SEQ ID NO: 14326), wherein “Nf” is a 2′ fluoro-modified nucleoside, “n” is a 2′ O-methyl modified nucleoside, and “s” is a phosphorothioate linkage. In some embodiments, the sense strand comprises modification pattern 15S: 5′-snnnnnNfNfNfNfndNnnnnnnnnsnsn-3′ (SEQ ID NO: 14327), wherein “Nf” is a 2′ fluoro-modified nucleoside, “n” is a 2′ O-methyl modified nucleoside, and “s” is a phosphorothioate linkage. In some embodiments, the sense strand comprises modification pattern 16S: 5′-snnNfnNfnNfndNnnnnnnnnnnsnsn-3′ (SEQ ID NO: 14328), wherein “Nf” is a 2′ fluoro-modified nucleoside, “n” is a 2′ O-methyl modified nucleoside, and “s” is a phosphorothioate linkage.

[0197] In some embodiments, the composition comprises an oligonucleotide that inhibits the expression of ANGPTL4 wherein the oligonucleotide comprises an siRNA comprising a sense strand and an antisense strand, wherein the antisense strand comprises modification pattern 1AS: 5′-nsNfsnNfnNfnNfnNfnnnNfnNfnNfnsnsn-3′ (SEQ ID NO: 13960), wherein “Nf” is a 2′ fluoro-modified nucleoside, “n” is a 2′ O-methyl modified nucleoside, and “s” is a phosphorothioate linkage. In some embodiments, the antisense strand comprises modification pattern 2AS: 5′-nsNfsnnnNfnNfNfnnnnNfnNfnnnsnsn-3′ (SEQ ID NO: 13961), wherein “Nf” is a 2′ fluoro-modified nucleoside, “n” is a 2′ O-methyl modified nucleoside, and “s” is a phosphorothioate linkage. In some embodiments, the antisense strand comprises modification pattern 3AS: 5′-nsNfsnnnNfnnnnnnnNfnNfnnnsnsn-3′ (SEQ ID NO: 13962), wherein “Nf” is a 2′ fluoro-modified nucleoside, “n” is a 2′ O-methyl modified nucleoside, and “s” is a phosphorothioate linkage. In some embodiments, the antisense strand comprises modification pattern 4AS: 5′-nsNfsnNfnNfnnnnnnnNfnNfnnnsnsn-3′ (SEQ ID NO: 13963), wherein “Nf” is a 2′ fluoro-modified nucleoside, “n” is a 2′ O-methyl modified nucleoside, and “s” is a phosphorothioate linkage. In some embodiments, the antisense strand comprises modification pattern 5AS: 5′-nsNfsnnnNfnNfnnnnnNfnNfnnnsnsn-3′ (SEQ ID NO: 13964), wherein “Nf” is a 2′ fluoro-modified nucleoside, “n” is a 2′ O-methyl modified nucleoside, and “s” is a phosphorothioate linkage. In some embodiments, the antisense strand comprises modification pattern 6AS: 5′-nsNfsnNfnNfnNfnNfnNfnNfnNfnNfnsnsn-3′ (SEQ ID NO: 13965), wherein “Nf” is a 2′ fluoro-modified nucleoside, “n” is a 2′ O-methyl modified nucleoside, and “s” is a phosphorothioate linkage. In some embodiments, the antisense strand comprises modification pattern 7AS: 5′-nsNfsnNfnNfnNfNfnnnnNfnNfnnnsnsn-3′ (SEQ ID NO: 13966), wherein “Nf” is a 2′ fluoro-modified nucleoside, “n” is a 2′ O-methyl modified nucleoside, and “s” is a phosphorothioate linkage. In some embodiments, the antisense strand comprises modification pattern 8AS: 5′-nsNfsnnnnnnnnnnnNfnnnnnsnsn-3′ (SEQ ID NO: 13967), wherein “Nf” is a 2′ fluoro-modified nucleoside, “n” is a 2′ O-methyl modified nucleoside, and “s” is a phosphorothioate linkage. In some embodiments, the antisense strand comprises modification pattern 9AS: 5′-nsNfsnnnNfnnnnnnnNfnNfnNfnsnsn-3′ (SEQ ID NO: 13968), wherein “Nf” is a 2′ fluoro-modifled nucleoside, “n” is a 2′ O-methyl modified nucleoside, and “s” is a phosphorothioate linkage. In some embodiments, the antisense strand comprises modification pattern 10AS: 5′-nsNfsnnnnnnnnnnnNfnNfnnnsnsn-3′ (SEQ ID NO: 14296), wherein “Nf” is a 2′ fluoro-modified nucleoside, “n” is a 2′ O-methyl modified nucleoside, and “s” is a phosphorothioate linkage. In some embodiments, the antisense strand comprises modification pattern 11AS: 5′-nsNfsnnnNfnnNfnnnnNfnNfnnnsnsn-3′ (SEQ ID NO: 14297), wherein “Nf” is a 2′ fluoro-modified nucleoside, “n” is a 2′ O-methyl modified nucleoside, and “s” is a phosphorothioate linkage. In some embodiments, the antisense strand comprises modification pattern 12AS: 5′-nsNfsnnnNfnNfnNfnNfnNfnNfnNfnsnsn-3′ (SEQ ID NO: 14329), wherein “Nf” is a 2′ fluoro-modified nucleoside, “n” is a 2′ O-methyl modified nucleoside, and “s” is a phosphorothioate linkage. In some embodiments, the antisense strand comprises modification pattern 13AS: 5′-nsNfsnsNfnNfnNfnNfnNfnNfnNfnNfnsnsn-3′ (SEQ ID NO: 14330), wherein “Nf” is a 2′ fluoro-modified nucleoside, “n” is a 2′ O-methyl modified nucleoside, and “s” is a phosphorothioate linkage. In some embodiments, the antisense strand comprises modification pattern 14AS: 5′-nsNfsnNfnNfnnnNfnNfnNfnNfnNfnsnsn-3′ (SEQ ID NO: 14331), wherein “Nf” is a 2′ fluoro-modified nucleoside, “n” is a 2′ O-methyl modified nucleoside, and “s” is a phosphorothioate linkage. In some embodiments, the antisense strand comprises modification pattern 15AS: 5′-nsNfsnNfnNfnnnnnNfnNfnNfnNfnsnsn-3′ (SEQ ID NO: 14332), wherein “Nf” is a 2′ fluoro-modified nucleoside, “n” is a 2′ O-methyl modified nucleoside, and “s” is a phosphorothioate linkage. Any one of modification patterns 1AS-11AS may include a GalNAc ligand attached to the 3′ end. Any one of modification patterns 1AS-11AS may include a GalNAc ligand attached to the 5′ end.

[0198] In some embodiments, the composition comprises an oligonucleotide that inhibits the expression of ANGPTL4 wherein the oligonucleotide comprises an siRNA comprising a sense strand and an antisense strand, wherein the sense strand comprises modification pattern 1S and the antisense strand comprises modification pattern 1AS, 2AS, 3AS, 4AS, 5AS, 6AS, 7AS, 8AS, 9AS, 10AS, 11AS, 12AS, 13AS, 14AS, or 15AS. In some embodiments, the sense strand comprises modification pattern 2S and the antisense strand comprises modification pattern 1AS, 2AS, 3AS, 4AS, 5AS, 6AS, 7AS, 8AS, 9AS, 10AS, 11AS, 12AS, 13AS, 14AS, or 15AS. In some embodiments, the sense strand comprises modification pattern 3S and the antisense strand comprises modification pattern 1AS, 2AS, 3AS, 4AS, 5AS, 6AS, 7AS, 8AS, 9AS, 10AS, 11AS, 12AS, 13AS, 14AS, or 15AS. In some embodiments, the sense strand comprises modification pattern 4S and the antisense strand comprises modification pattern 1AS, 2AS, 3AS, 4AS, 5AS, 6AS, 7AS, 8AS, 9AS, 10AS, 11AS, 12AS, 13AS, 14AS, or 15AS. In some embodiments, the sense strand comprises modification pattern 5S and the antisense strand comprises modification pattern 1AS, 2AS, 3AS, 4AS, 5AS, 6AS, 7AS, 8AS, 9AS, 10AS, 11AS, 12AS, 13AS, 14AS, or 15AS. In some embodiments, the sense strand comprises modification pattern 6S and the antisense strand comprises modification pattern 1AS, 2AS, 3AS, 4AS, 5AS, 6AS, 7AS, 8AS, 9AS, 10AS, 11AS, 12AS, 13AS, 14AS, or 15AS. In some embodiments, the sense strand comprises modification pattern 7S and the antisense strand comprises modification pattern 1AS, 2AS, 3AS, 4AS, 5AS, 6AS, 7AS, 8AS, 9AS, 10AS, 11AS, 12AS, 13AS, 14AS, or 15AS. In some embodiments, the sense strand comprises modification pattern 8S and the antisense strand comprises modification pattern 1AS, 2AS, 3AS, 4AS, 5AS, 6AS, 7AS, 8AS, 9AS, 10AS, 11AS, 12AS, 13AS, 14AS, or 15AS. In some embodiments, the sense strand comprises modification pattern 9S and the antisense strand comprises modification pattern 1AS, 2AS, 3AS, 4AS, 5AS, 6AS, 7AS, 8AS, 9AS, 10AS, 11AS, 12AS, 13AS, 14AS, or 15AS. In some embodiments, the sense strand comprises modification pattern 10S and the antisense strand comprises modification pattern 1AS, 2AS, 3AS, 4AS, 5AS, 6AS, 7AS, 8AS, 9AS, 10AS, 11AS, 12AS, 13AS, 14AS, or 15AS. In some embodiments, the sense strand comprises modification pattern 11S and the antisense strand comprises modification pattern 1AS, 2AS, 3AS, 4AS, 5AS, 6AS, 7AS, 8AS, 9AS, 10AS, 11AS, 12AS, 13AS, 14AS, or 15AS. In some embodiments, the sense strand comprises modification pattern 12S and the antisense strand comprises modification pattern 1AS, 2AS, 3AS, 4AS, 5AS, 6AS, 7AS, 8AS, 9AS, 10AS, 11AS, 12AS, 13AS, 14AS, or 15AS. In some embodiments, the sense strand comprises modification pattern 13S and the antisense strand comprises modification pattern 1AS, 2AS, 3AS, 4AS, 5AS, 6AS, 7AS, 8AS, 9AS, 10AS, 11AS, 12AS, 13AS, 14AS, or 15AS. In some embodiments, the sense strand comprises modification pattern 14S and the antisense strand comprises modification pattern 1AS, 2AS, 3AS, 4AS, 5AS, 6AS, 7AS, 8AS, 9AS, 10AS, 11AS, 12AS, 13AS, 14AS, or 15AS. In some embodiments, the sense strand comprises modification pattern 15S and the antisense strand comprises modification pattern 1AS, 2AS, 3AS, 4AS, 5AS, 6AS, 7AS, 8AS, 9AS, 10AS, 11AS, 12AS, 13AS, 14AS, or 15AS. In some embodiments, the sense strand comprises modification pattern 16S and the antisense strand comprises modification pattern 1AS, 2AS, 3AS, 4AS, 5AS, 6AS, 7AS, 8AS, 9AS, 10AS, 11AS, 12AS, 13AS, 14AS, or 15AS. In some embodiments, the sense strand comprises modification pattern 1S, 2S, 3S, 4S, 5S, 6S, 7S, 8S, 9S, 10S, 11S, 12S, 13S, or 14S. In some embodiments, the antisense strand comprises modification pattern 1S, 2S, 3S, 4S, 5S, 6S, 7S, 8S, 9S, 10S, 11S, 12S, 13S, or 14S. In some embodiments, the sense strand comprises modification pattern 1AS, 2AS, 3AS, 4AS, 5AS, 6AS, 7AS, 8AS, 9AS, 10AS, or 11AS. In some embodiments, the antisense strand comprises modification pattern 1AS, 2AS, 3AS, 4AS, 5AS, 6AS, 7AS, 8AS, 9AS, 10AS, or 11AS. In some embodiments, the sense strand or the antisense strand comprises modification pattern ASO1.

[0199] Any combination of sense and antisense modification patterns may be used. In some embodiments, the sense strand comprises modification pattern 1S, and the antisense strand comprises modification pattern 1AS. In some embodiments, the sense strand comprises modification pattern 2S, and the antisense strand comprises modification pattern 2AS. In some embodiments, the sense strand comprises modification pattern 2S, and the antisense strand comprises modification pattern 3AS. In some embodiments, the sense strand comprises modification pattern 3S, and the antisense strand comprises modification pattern 1AS. In some embodiments, the sense strand comprises modification pattern 3S, and the antisense strand comprises modification pattern 4AS. In some embodiments, the sense strand comprises modification pattern 3S, and the antisense strand comprises modification pattern 5AS. In some embodiments, the sense strand comprises modification pattern 3S, and the antisense strand comprises modification pattern 6AS. In some embodiments, the sense strand comprises modification pattern 3S, and the antisense strand comprises modification pattern 7AS. In some embodiments, the sense strand comprises modification pattern 3S, and the antisense strand comprises modification pattern 8AS. In some embodiments, the sense strand comprises modification pattern 6S, and the antisense strand comprises modification pattern 1AS. In some embodiments, the sense strand comprises modification pattern 6S, and the antisense strand comprises modification pattern 4AS. In some embodiments, the sense strand comprises modification pattern 6S, and the antisense strand comprises modification pattern 5AS. In some embodiments, the sense strand comprises modification pattern 6S, and the antisense strand comprises modification pattern 6AS. In some embodiments, the sense strand comprises modification pattern 6S, and the antisense strand comprises modification pattern 7AS. In some embodiments, the sense strand comprises modification pattern 6S, and the antisense strand comprises modification pattern 8AS. Any combination may include a sense strand having modification pattern 7S, 8S, or 9S. Any combination may include a sense strand having modification pattern 10S, 11S, 12S, 13S, 14S, 15S, or 16S. Any combination may include an antisense strand having modification pattern 10AS or 11AS. Any combination may include an antisense strand having modification pattern 12AS, 13AS, 14AS, or 15AS.

[0200] In some embodiments, the composition comprises an oligonucleotide that inhibits the expression of ANGPTL4 wherein the oligonucleotide comprises an siRNA comprising a sense strand and an antisense strand, wherein the sense strand comprises a nucleoside sequence comprising or consisting of the sequence of any one of SEQ ID NOs: 1-1854 or 13970-13977, and modification pattern 1S. In some embodiments, the sense strand comprises a nucleoside sequence comprising or consisting of the sequence of any one of SEQ ID NOs: 1-1854 or 13970-13977, or a nucleic acid sequence thereof having 1 or 2 nucleoside substitutions, additions, or deletions, and modification pattern 1S. In some embodiments, the sense strand comprises a nucleoside sequence comprising or consisting of the sequence of any one of SEQ ID NOs: 1-1854 or 13970-13977, or a nucleic acid sequence thereof having 3 or 4 nucleoside substitutions, additions, or deletions, and modification pattern 1S.

[0201] In some embodiments, the composition comprises an oligonucleotide that inhibits the expression of ANGPTL4 wherein the oligonucleotide comprises an siRNA comprising a sense strand and an antisense strand, wherein the sense strand comprises a nucleoside sequence comprising or consisting of the sequence of any one of SEQ ID NOs: 1-1854 or 13970-13977, and modification pattern 2S. In some embodiments, the sense strand comprises a nucleoside sequence comprising or consisting of the sequence of any one of SEQ ID NOs: 1-1854 or 13970-13977, or a nucleic acid sequence thereof having 1 or 2 nucleoside substitutions, additions, or deletions, and modification pattern 2S. In some embodiments, the sense strand comprises a nucleoside sequence comprising or consisting of the sequence of any one of SEQ ID NOs: 1-1854 or 13970-13977, or a nucleic acid sequence thereof having 3 or 4 nucleoside substitutions, additions, or deletions, and modification pattern 2S.

[0202] In some embodiments, the composition comprises an oligonucleotide that inhibits the expression of ANGPTL4 wherein the oligonucleotide comprises an siRNA comprising a sense strand and an antisense strand, wherein the sense strand comprises a nucleoside sequence comprising or consisting of the sequence of any one of SEQ ID NOs: 1-1854 or 13970-13977, and modification pattern 3S. In some embodiments, the sense strand comprises a nucleoside sequence comprising or consisting of the sequence of any one of SEQ ID NOs: 1-1854 or 13970-13977, or a nucleic acid sequence thereof having 1 or 2 nucleoside substitutions, additions, or deletions, and modification pattern 3S. In some embodiments, the sense strand comprises a nucleoside sequence comprising or consisting of the sequence of any one of SEQ ID NOs: 1-1854 or 13970-13977, or a nucleic acid sequence thereof having 3 or 4 nucleoside substitutions, additions, or deletions, and modification pattern 3S.

[0203] In some embodiments, the composition comprises an oligonucleotide that inhibits the expression of ANGPTL4 wherein the oligonucleotide comprises an siRNA comprising a sense strand and an antisense strand, wherein the sense strand comprises a nucleoside sequence comprising or consisting of the sequence of any one of SEQ ID NOs: 1-1854 or 13970-13977, and modification pattern 4S. In some embodiments, the sense strand comprises a nucleoside sequence comprising or consisting of the sequence of any one of SEQ ID NOs: 1-1854 or 13970-13977, or a nucleic acid sequence thereof having 1 or 2 nucleoside substitutions, additions, or deletions, and modification pattern 4S. In some embodiments, the sense strand comprises a nucleoside sequence comprising or consisting of the sequence of any one of SEQ ID NOs: 1-1854 or 13970-13977, or a nucleic acid sequence thereof having 3 or 4 nucleoside substitutions, additions, or deletions, and modification pattern 4S.

[0204] In some embodiments, the composition comprises an oligonucleotide that inhibits the expression of ANGPTL4 wherein the oligonucleotide comprises an siRNA comprising a sense strand and an antisense strand, wherein the sense strand comprises a nucleoside sequence comprising or consisting of the sequence of any one of SEQ ID NOs: 1-1854 or 13970-13977, and modification pattern 5S. In some embodiments, the sense strand comprises a nucleoside sequence comprising or consisting of the sequence of any one of SEQ ID NOs: 1-1854 or 13970-13977, or a nucleic acid sequence thereof having 1 or 2 nucleoside substitutions, additions, or deletions, and modification pattern 5S. In some embodiments, the sense strand comprises a nucleoside sequence comprising or consisting of the sequence of any one of SEQ ID NOs: 1-1854 or 13970-13977, or a nucleic acid sequence thereof having 3 or 4 nucleoside substitutions, additions, or deletions, and modification pattern 5S.

[0205] In some embodiments, the composition comprises an oligonucleotide that inhibits the expression of ANGPTL4 wherein the oligonucleotide comprises an siRNA comprising a sense strand and an antisense strand, wherein the sense strand comprises a nucleoside sequence comprising or consisting of the sequence of any one of SEQ ID NOs: 1-1854 or 13970-13977, and modification pattern 6S. In some embodiments, the sense strand comprises a nucleoside sequence comprising or consisting of the sequence of any one of SEQ ID NOs: 1-1854 or 13970-13977, or a nucleic acid sequence thereof having 1 or 2 nucleoside substitutions, additions, or deletions, and modification pattern 6S. In some embodiments, the sense strand comprises a nucleoside sequence comprising or consisting of the sequence of any one of SEQ ID NOs: 1-1854 or 13970-13977, or a nucleic acid sequence thereof having 3 or 4 nucleoside substitutions, additions, or deletions, and modification pattern 6S.

[0206] In some embodiments, the composition comprises an oligonucleotide that inhibits the expression of ANGPTL4 wherein the oligonucleotide comprises an siRNA comprising a sense strand and an antisense strand, wherein the sense strand comprises a nucleoside sequence comprising or consisting of the sequence of any one of SEQ ID NOs: 1-1854 or 13970-13977, and modification pattern 7S. In some embodiments, the sense strand comprises a nucleoside sequence comprising or consisting of the sequence of any one of SEQ ID NOs: 1-1854 or 13970-13977, or a nucleic acid sequence thereof having 1 or 2 nucleoside substitutions, additions, or deletions, and modification pattern 7S. In some embodiments, the sense strand comprises a nucleoside sequence comprising or consisting of the sequence of any one of SEQ ID NOs: 1-1854 or 13970-13977, or a nucleic acid sequence thereof having 3 or 4 nucleoside substitutions, additions, or deletions, and modification pattern 7S.

[0207] In some embodiments, the composition comprises an oligonucleotide that inhibits the expression of ANGPTL4 wherein the oligonucleotide comprises an siRNA comprising a sense strand and an antisense strand, wherein the sense strand comprises a nucleoside sequence comprising or consisting of the sequence of any one of SEQ ID NOs: 1-1854 or 13970-13977, and modification pattern 8S. In some embodiments, the sense strand comprises a nucleoside sequence comprising or consisting of the sequence of any one of SEQ ID NOs: 1-1854 or 13970-13977, or a nucleic acid sequence thereof having 1 or 2 nucleoside substitutions, additions, or deletions, and modification pattern 8S. In some embodiments, the sense strand comprises a nucleoside sequence comprising or consisting of the sequence of any one of SEQ ID NOs: 1-1854 or 13970-13977, or a nucleic acid sequence thereof having 3 or 4 nucleoside substitutions, additions, or deletions, and modification pattern 8S.

[0208] In some embodiments, the composition comprises an oligonucleotide that inhibits the expression of ANGPTL4 wherein the oligonucleotide comprises an siRNA comprising a sense strand and an antisense strand, wherein the sense strand comprises a nucleoside sequence comprising or consisting of the sequence of any one of SEQ ID NOs: 1-1854 or 13970-13977, and modification pattern 9S. In some embodiments, the sense strand comprises a nucleoside sequence comprising or consisting of the sequence of any one of SEQ ID NOs: 1-1854 or 13970-13977, or a nucleic acid sequence thereof having 1 or 2 nucleoside substitutions, additions, or deletions, and modification pattern 9S. In some embodiments, the sense strand comprises a nucleoside sequence comprising or consisting of the sequence of any one of SEQ ID NOs: 1-1854 or 13970-13977, or a nucleic acid sequence thereof having 3 or 4 nucleoside substitutions, additions, or deletions, and modification pattern 9S.

[0209] In some embodiments, the composition comprises an oligonucleotide that inhibits the expression of ANGPTL4 wherein the oligonucleotide comprises an siRNA comprising a sense strand and an antisense strand, wherein the antisense strand comprises a nucleoside sequence comprising or consisting of the sequence of any one of SEQ ID NOs: 1-1854 or 13970-13977, and modification pattern 1AS. In some embodiments, the antisense strand comprises a nucleoside sequence comprising or consisting of the sequence of any one of SEQ ID NOs: 1-1854 or 13970-13977, or a nucleic acid sequence thereof having 1 or 2 nucleoside substitutions, additions, or deletions, and modification pattern 1AS. In some embodiments, the antisense strand comprises a nucleoside sequence comprising or consisting of the sequence of any one of SEQ ID NOs: 1-1854 or 13970-13977, or a nucleic acid sequence thereof having 3 or 4 nucleoside substitutions, additions, or deletions, and modification pattern 1AS.

[0210] In some embodiments, the composition comprises an oligonucleotide that inhibits the expression of ANGPTL4 wherein the oligonucleotide comprises an siRNA comprising a sense strand and an antisense strand, wherein the antisense strand comprises a nucleoside sequence comprising or consisting of the sequence of any one of SEQ ID NOs: 1-1854 or 13970-13977, and modification pattern 2AS. In some embodiments, the antisense strand comprises a nucleoside sequence comprising or consisting of the sequence of any one of SEQ ID NOs: 1-1854 or 13970-13977, or a nucleic acid sequence thereof having 1 or 2 nucleoside substitutions, additions, or deletions, and modification pattern 2AS. In some embodiments, the antisense strand comprises a nucleoside sequence comprising or consisting of the sequence of any one of SEQ ID NOs: 1-1854 or 13970-13977, or a nucleic acid sequence thereof having 3 or 4 nucleoside substitutions, additions, or deletions, and modification pattern 2AS.

[0211] In some embodiments, the composition comprises an oligonucleotide that inhibits the expression of ANGPTL4 wherein the oligonucleotide comprises an siRNA comprising a sense strand and an antisense strand, wherein the antisense strand comprises a nucleoside sequence comprising or consisting of the sequence of any one of SEQ ID NOs: 1-1854 or 13970-13977, and modification pattern 3AS. In some embodiments, the antisense strand comprises a nucleoside sequence comprising or consisting of the sequence of any one of SEQ ID NOs: 1-1854 or 13970-13977, or a nucleic acid sequence thereof having 1 or 2 nucleoside substitutions, additions, or deletions, and modification pattern 3AS. In some embodiments, the antisense strand comprises a nucleoside sequence comprising or consisting of the sequence of any one of SEQ ID NOs: 1-1854 or 13970-13977, or a nucleic acid sequence thereof having 3 or 4 nucleoside substitutions, additions, or deletions, and modification pattern 3AS.

[0212] In some embodiments, the composition comprises an oligonucleotide that inhibits the expression of ANGPTL4 wherein the oligonucleotide comprises an siRNA comprising a sense strand and an antisense strand, wherein the antisense strand comprises a nucleoside sequence comprising or consisting of the sequence of any one of SEQ ID NOs: 1-1854 or 13970-13977, and modification pattern 4AS. In some embodiments, the antisense strand comprises a nucleoside sequence comprising or consisting of the sequence of any one of SEQ ID NOs: 1-1854 or 13970-13977, or a nucleic acid sequence thereof having 1 or 2 nucleoside substitutions, additions, or deletions, and modification pattern 4AS. In some embodiments, the antisense strand comprises a nucleoside sequence comprising or consisting of the sequence of any one of SEQ ID NOs: 1-1854 or 13970-13977, or a nucleic acid sequence thereof having 3 or 4 nucleoside substitutions, additions, or deletions, and modification pattern 4AS.

[0213] In some embodiments, the composition comprises an oligonucleotide that inhibits the expression of ANGPTL4 wherein the oligonucleotide comprises an siRNA comprising a sense strand and an antisense strand, wherein the antisense strand comprises a nucleoside sequence comprising or consisting of the sequence of any one of SEQ ID NOs: 1-1854 or 13970-13977, and modification pattern 5AS. In some embodiments, the antisense strand comprises a nucleoside sequence comprising or consisting of the sequence of any one of SEQ ID NOs: 1-1854 or 13970-13977, or a nucleic acid sequence thereof having 1 or 2 nucleoside substitutions, additions, or deletions, and modification pattern 5AS. In some embodiments, the antisense strand comprises a nucleoside sequence comprising or consisting of the sequence of any one of SEQ ID NOs: 1-1854 or 13970-13977, or a nucleic acid sequence thereof having 3 or 4 nucleoside substitutions, additions, or deletions, and modification pattern 5AS.

[0214] In some embodiments, the composition comprises an oligonucleotide that inhibits the expression of ANGPTL4 wherein the oligonucleotide comprises an siRNA comprising a sense strand and an antisense strand, wherein the antisense strand comprises a nucleoside sequence comprising or consisting of the sequence of any one of SEQ ID NOs: 1-1854 or 13970-13977, and modification pattern 6AS. In some embodiments, the antisense strand comprises a nucleoside sequence comprising or consisting of the sequence of any one of SEQ ID NOs: 1-1854 or 13970-13977, or a nucleic acid sequence thereof having 1 or 2 nucleoside substitutions, additions, or deletions, and modification pattern 6AS. In some embodiments, the antisense strand comprises a nucleoside sequence comprising or consisting of the sequence of any one of SEQ ID NOs: 1-1854 or 13970-13977, or a nucleic acid sequence thereof having 3 or 4 nucleoside substitutions, additions, or deletions, and modification pattern 6AS.

[0215] In some embodiments, the composition comprises an oligonucleotide that inhibits the expression of ANGPTL4 wherein the oligonucleotide comprises an siRNA comprising a sense strand and an antisense strand, wherein the antisense strand comprises a nucleoside sequence comprising or consisting of the sequence of any one of SEQ ID NOs: 1-1854 or 13970-13977, and modification pattern 7AS. In some embodiments, the antisense strand comprises a nucleoside sequence comprising or consisting of the sequence of any one of SEQ ID NOs: 1-1854 or 13970-13977, or a nucleic acid sequence thereof having 1 or 2 nucleoside substitutions, additions, or deletions, and modification pattern 7AS. In some embodiments, the antisense strand comprises a nucleoside sequence comprising or consisting of the sequence of any one of SEQ ID NOs: 1-1854 or 13970-13977, or a nucleic acid sequence thereof having 3 or 4 nucleoside substitutions, additions, or deletions, and modification pattern 7AS.

[0216] In some embodiments, the composition comprises an oligonucleotide that inhibits the expression of ANGPTL4 wherein the oligonucleotide comprises an siRNA comprising a sense strand and an antisense strand, wherein the antisense strand comprises a nucleoside sequence comprising or consisting of the sequence of any one of SEQ ID NOs: 1-1854 or 13970-13977, and modification pattern 8AS. In some embodiments, the antisense strand comprises a nucleoside sequence comprising or consisting of the sequence of any one of SEQ ID NOs: 1-1854 or 13970-13977, or a nucleic acid sequence thereof having 1 or 2 nucleoside substitutions, additions, or deletions, and modification pattern 8AS. In some embodiments, the antisense strand comprises a nucleoside sequence comprising or consisting of the sequence of any one of SEQ ID NOs: 1-1854 or 13970-13977, or a nucleic acid sequence thereof having 3 or 4 nucleoside substitutions, additions, or deletions, and modification pattern 8AS.

[0217] In some embodiments, the composition comprises an oligonucleotide that inhibits the expression of ANGPTL4 wherein the oligonucleotide comprises an siRNA comprising a sense strand and an antisense strand, wherein the antisense strand comprises a nucleoside sequence comprising or consisting of the sequence of any one of SEQ ID NOs: 1-1854 or 13970-13977, and modification pattern 9AS. In some embodiments, the antisense strand comprises a nucleoside sequence comprising or consisting of the sequence of any one of SEQ ID NOs: 1-1854 or 13970-13977, or a nucleic acid sequence thereof having 1 or 2 nucleoside substitutions, additions, or deletions, and modification pattern 9AS. In some embodiments, the antisense strand comprises a nucleoside sequence comprising or consisting of the sequence of any one of SEQ ID NOs: 1-1854 or 13970-13977, or a nucleic acid sequence thereof having 3 or 4 nucleoside substitutions, additions, or deletions, and modification pattern 9AS.

[0218] In some embodiments, the composition comprises an oligonucleotide that inhibits the expression of ANGPTL4 wherein the oligonucleotide comprises an siRNA comprising a sense strand and an antisense strand, wherein the antisense strand comprises a nucleoside sequence comprising or consisting of the sequence of any one of SEQ ID NOs: 1-1854 or 13970-13977, and modification pattern 10AS. In some embodiments, the antisense strand comprises a nucleoside sequence comprising or consisting of the sequence of any one of SEQ ID NOs: 1-1854 or 13970-13977, or a nucleic acid sequence thereof having 1 or 2 nucleoside substitutions, additions, or deletions, and modification pattern 10AS. In some embodiments, the antisense strand comprises a nucleoside sequence comprising or consisting of the sequence of any one of SEQ ID NOs: 1-1854 or 13970-13977, or a nucleic acid sequence thereof having 3 or 4 nucleoside substitutions, additions, or deletions, and modification pattern 10AS.

[0219] In some embodiments, the composition comprises an oligonucleotide that inhibits the expression of ANGPTL4 wherein the oligonucleotide comprises an siRNA comprising a sense strand and an antisense strand, wherein the antisense strand comprises a nucleoside sequence comprising or consisting of the sequence of any one of SEQ ID NOs: 1-1854 or 13970-13977, and modification pattern 11AS. In some embodiments, the antisense strand comprises a nucleoside sequence comprising or consisting of the sequence of any one of SEQ ID NOs: 1-1854 or 13970-13977, or a nucleic acid sequence thereof having 1 or 2 nucleoside substitutions, additions, or deletions, and modification pattern 11AS. In some embodiments, the antisense strand comprises a nucleoside sequence comprising or consisting of the sequence of any one of SEQ ID NOs: 1-1854 or 13970-13977, or a nucleic acid sequence thereof having 3 or 4 nucleoside substitutions, additions, or deletions, and modification pattern 11AS.

[0220] In some embodiments, the sense strand comprises a nucleoside sequence comprising or consisting the sequence of any one of SEQ ID NOs: 1-1854 or 13970-13977, an overhang (such as a 2 base 3′ overhang), and modification pattern 1S. In some embodiments, the sense strand comprises a nucleoside sequence comprising or consisting the sequence of any one of SEQ ID NOs: 1-1854 or 13970-13977, an overhang (such as a 2 base 3′ overhang), and modification pattern 2S. In some embodiments, the sense strand comprises a nucleoside sequence comprising or consisting the sequence of any one of SEQ ID NOs: 1-1854 or 13970-13977, an overhang (such as a 2 base 3′ overhang), and modification pattern 3S. In some embodiments, the sense strand comprises a nucleoside sequence comprising or consisting the sequence of any one of SEQ ID NOs: 1-1854 or 13970-13977, an overhang (such as a 2 base 3′ overhang), and modification pattern 4S. In some embodiments, the sense strand comprises a nucleoside sequence comprising or consisting the sequence of any one of SEQ ID NOs: 1-1854 or 13970-13977, an overhang (such as a 2 base 3′ overhang), and modification pattern 5S. In some embodiments, the sense strand comprises a nucleoside sequence comprising or consisting the sequence of any one of SEQ ID NOs: 1-1854 or 13970-13977, an overhang (such as a 2 base 3′ overhang), and modification pattern 6S. In some embodiments, the sense strand comprises a nucleoside sequence comprising or consisting the sequence of any one of SEQ ID NOs: 1-1854 or 13970-13977, an overhang (such as a 2 base 3′ overhang), and modification pattern 7S. In some embodiments, the sense strand comprises a nucleoside sequence comprising or consisting the sequence of any one of SEQ ID NOs: 1-1854 or 13970-13977, an overhang (such as a 2 base 3′ overhang), and modification pattern 8S. In some embodiments, the sense strand comprises a nucleoside sequence comprising or consisting the sequence of any one of SEQ ID NOs: 1-1854 or 13970-13977, an overhang (such as a 2 base 3′ overhang), and modification pattern 9S. In some embodiments, the antisense strand comprises a nucleoside sequence comprising or consisting of the sequence of any one of SEQ ID NOs: 1855-3708 or 13978-13985, and an overhang (such as a 2 base 3′ overhang), and modification pattern 1AS. In some embodiments, the antisense strand comprises a nucleoside sequence comprising or consisting of the sequence of any one of SEQ ID NOs: 1855-3708 or 13978-13985, and an overhang (such as a 2 base 3′ overhang), and modification pattern 2AS. In some embodiments, the antisense strand comprises a nucleoside sequence comprising or consisting of the sequence of any one of SEQ ID NOs: 1855-3708 or 13978-13985, and an overhang (such as a 2 base 3′ overhang), and modification pattern 3AS. In some embodiments, the antisense strand comprises a nucleoside sequence comprising or consisting of the sequence of any one of SEQ ID NOs: 1855-3708 or 13978-13985, and an overhang (such as a 2 base 3′ overhang), and modification pattern 4AS. In some embodiments, the antisense strand comprises a nucleoside sequence comprising or consisting of the sequence of any one of SEQ ID NOs: 1855-3708 or 13978-13985, and an overhang (such as a 2 base 3′ overhang), and modification pattern 5AS. In some embodiments, the antisense strand comprises a nucleoside sequence comprising or consisting of the sequence of any one of SEQ ID NOs: 1855-3708 or 13978-13985, and an overhang (such as a 2 base 3′ overhang), and modification pattern 6AS. In some embodiments, the antisense strand comprises a nucleoside sequence comprising or consisting of the sequence of any one of SEQ ID NOs: 1855-3708 or 13978-13985, and an overhang (such as a 2 base 3′ overhang), and modification pattern 7AS. In some embodiments, the antisense strand comprises a nucleoside sequence comprising or consisting of the sequence of any one of SEQ ID NOs: 1855-3708 or 13978-13985, and an overhang (such as a 2 base 3′ overhang), and modification pattern 8AS. In some embodiments, the antisense strand comprises a nucleoside sequence comprising or consisting of the sequence of any one of SEQ ID NOs: 1855-3708 or 13978-13985, and an overhang (such as a 2 base 3′ overhang), and modification pattern 9AS. In some embodiments, the antisense strand comprises a nucleoside sequence comprising or consisting of the sequence of any one of SEQ ID NOs: 1855-3708 or 13978-13985, and an overhang (such as a 2 base 3′ overhang), and modification pattern 10AS. In some embodiments, the antisense strand comprises a nucleoside sequence comprising or consisting of the sequence of any one of SEQ ID NOs: 1855-3708 or 13978-13985, and an overhang (such as a 2 base 3′ overhang), and modification pattern 11AS. In some embodiments, the overhang comprises one or more uracil nucleosides. In some embodiments, the one or more uracil nucleosides of the overhang are connected at the 3′ end to another nucleoside via a phosphorothioate linkage. In some embodiments, the overhang comprises one uracil nucleoside. In some embodiments, the overhang comprises two uracil nucleoside.

[0221] Some embodiments include a composition comprising an oligonucleotide that targets Angiopoietin like 4 (ANGPTL4) and when administered to a cell decreases expression of ANGPTL4, wherein the oligonucleotide comprises a small interfering RNA (siRNA) comprising a sense strand and an antisense strand, wherein the sense strand comprises an oligonucleotide sequence of SEQ ID NOs: 759, 1285, 1580, or 1840 in which at least one internucleoside linkage is modified and at least one base is modified, or an oligonucleotide sequence comprising 1 or 2 nucleoside, substitutions, additions, or deletions of SEQ ID NOs: 759, 1285, 1580, or 1840 in which at least one internucleoside linkage is modified and at least one base is modified, and wherein the antisense strand comprises an oligonucleotide sequence of SEQ ID NOs: 2613, 3139, 3434, or 3694 in which at least one internucleoside linkage is modified and at least one base is modified, or an oligonucleotide sequence comprising 1 or 2 nucleoside, substitutions, additions, or deletions of SEQ ID NOs: 2613, 3139, 3434, or 3694 in which at least one internucleoside linkage is modified and at least one base is modified.

[0222] Some embodiments include a composition comprising an oligonucleotide that targets Angiopoietin like 4 (ANGPTL4) and when administered to a cell decreases expression of ANGPTL4, wherein the oligonucleotide comprises a small interfering RNA (siRNA) comprising a sense strand and an antisense strand, wherein the sense strand comprises an oligonucleotide sequence of any one of SEQ ID NOs: 13970-13973 in which at least one internucleoside linkage is modified and at least one base is modified, or an oligonucleotide sequence comprising 1 or 2 nucleoside, substitutions, additions, or deletions of any one of SEQ ID NOs: 13970-13973 in which at least one internucleoside linkage is modified and at least one base is modified, and wherein the antisense strand comprises an oligonucleotide sequence of any one of SEQ ID NOs: 13978-13981 in which at least one internucleoside linkage is modified and at least one base is modified, or an oligonucleotide sequence comprising 1 or 2 nucleoside, substitutions, additions, or deletions of any one of SEQ ID NOs: 13978-13981 in which at least one internucleoside linkage is modified and at least one base is modified.

[0223] Some embodiments include a composition comprising an oligonucleotide that targets Angiopoietin like 4 (ANGPTL4) and when administered to a cell decreases expression of ANGPTL4, wherein the oligonucleotide comprises a small interfering RNA (siRNA) comprising a sense strand and an antisense strand, wherein the sense strand comprises an oligonucleotide sequence of any one of SEQ ID NOs: 13974-13977 in which at least one internucleoside linkage is modified and at least one base is modified, or an oligonucleotide sequence comprising 1 or 2 nucleoside, substitutions, additions, or deletions of any one of SEQ ID NOs: 13974-13977 in which at least one internucleoside linkage is modified and at least one base is modified, and wherein the antisense strand comprises an oligonucleotide sequence of any one of SEQ ID NOs: 13982-13985 in which at least one internucleoside linkage is modified and at least one base is modified, or an oligonucleotide sequence comprising 1 or 2 nucleoside, substitutions, additions, or deletions of any one of SEQ ID NOs: 13982-13985 in which at least one internucleoside linkage is modified and at least one base is modified.

[0224] Some embodiments include a composition comprising an oligonucleotide that targets Angiopoietin like 4 (ANGPTL4) and when administered to a cell decreases expression of ANGPTL4, wherein the oligonucleotide comprises a small interfering RNA (siRNA) comprising a sense strand and an antisense strand, wherein the sense strand comprises an oligonucleotide sequence of any one of SEQ ID NOs: 13990-14005 in which at least one internucleoside linkage is modified and at least one base is modified, or an oligonucleotide sequence comprising 1 or 2 nucleoside, substitutions, additions, or deletions of any one of SEQ ID NOs: 13990-14005 in which at least one internucleoside linkage is modified and at least one base is modified, and wherein the antisense strand comprises an oligonucleotide sequence of any one of SEQ ID NOs: 14134-14157 in which at least one internucleoside linkage is modified and at least one base is modified, or an oligonucleotide sequence comprising 1 or 2 nucleoside, substitutions, additions, or deletions of any one of SEQ ID NOs: 14134-14157 in which at least one internucleoside linkage is modified and at least one base is modified.

[0225] Some embodiments include a composition comprising an oligonucleotide that targets Angiopoietin like 4 (ANGPTL4) and when administered to a cell decreases expression of ANGPTL4, wherein the oligonucleotide comprises a small interfering RNA (siRNA) comprising a sense strand and an antisense strand, wherein the sense strand comprises an oligonucleotide sequence of any one of SEQ ID NOs: 1-1854 in which at least one internucleoside linkage is modified and at least one base is modified, or an oligonucleotide sequence comprising 1 or 2 nucleoside, substitutions, additions, or deletions of any one of SEQ ID NOs: 1-1854 in which at least one internucleoside linkage is modified and at least one base is modified, and wherein the antisense strand comprises an oligonucleotide sequence of any one of SEQ ID NOs: 1855-3708 in which at least one internucleoside linkage is modified and at least one base is modified, or an oligonucleotide sequence comprising 1 or 2 nucleoside, substitutions, additions, or deletions of any one of SEQ ID NOs: 1855-3708 in which at least one internucleoside linkage is modified and at least one base is modified.

[0226] In some embodiments, purines of the sense strand comprise 2′ fluoro modified purines. In some embodiments, purines of the sense strand comprise 2′ methyl modified purines. In some embodiments, purines of the sense strand comprise a mixture of 2′ fluoro and 2′ methyl modified purines. In some embodiments, all purines of the sense strand comprise 2′ fluoro modified purines. In some embodiments, all purines of the sense strand comprise 2′ methyl modified purines. In some embodiments, all purines of the sense strand comprise a mixture of 2′ fluoro and 2′ methyl modified purines.

[0227] In some embodiments, pyrimidines of the sense strand comprise 2′ fluoro modified pyrimidines. In some embodiments, pyrimidines of the sense strand comprise 2′ methyl modified pyrimidines. In some embodiments, pyrimidines of the sense strand comprise a mixture of 2′ fluoro and 2′ methyl modified pyrimidines. In some embodiments, all pyrimidines of the sense strand comprise 2′ fluoro modified pyrimidines. In some embodiments, all pyrimidines of the sense strand comprise 2′ methyl modified pyrimidines. In some embodiments, all pyrimidines of the sense strand comprise a mixture of 2′ fluoro and 2′ methyl modified pyrimidines.

[0228] In some embodiments, purines of the sense strand comprise 2′ fluoro modified purines, and pyrimidines of the sense strand comprise a mixture of 2′ fluoro and 2′ methyl modified pyrimidines. In some embodiments, purines of the sense strand comprise 2′ methyl modified purines, and pyrimidines of the sense strand comprise a mixture of 2′ fluoro and 2′ methyl modified pyrimidines. In some embodiments, purines of the sense strand comprise 2′ fluoro modified purines, and pyrimidines of the sense strand comprise 2′ methyl modified pyrimidines. In some embodiments, purines of the sense strand comprise 2′ methyl modified purines, and pyrimidines of the sense strand comprise 2′ fluoro modified pyrimidines. In some embodiments, pyrimidines of the sense strand comprise 2′ fluoro modified pyrimidines, and purines of the sense strand comprise a mixture of 2′ fluoro and 2′ methyl modified purines. In some embodiments, pyrimidines of the sense strand comprise 2′ methyl modified pyrimidines, and purines of the sense strand comprise a mixture of 2′ fluoro and 2′ methyl modified purines. In some embodiments, pyrimidines of the sense strand comprise 2′ fluoro modified pyrimidines, and purines of the sense strand comprise 2′ methyl modified purines. In some embodiments, pyrimidines of the sense strand comprise 2′ methyl modified pyrimidines, and purines of the sense strand comprise 2′ fluoro modified purines.

[0229] In some embodiments, all purines of the sense strand comprise 2′ fluoro modified purines, and all pyrimidines of the sense strand comprise a mixture of 2′ fluoro and 2′ methyl modified pyrimidines. In some embodiments, all purines of the sense strand comprise 2′ methyl modified purines, and all pyrimidines of the sense strand comprise a mixture of 2′ fluoro and 2′ methyl modified pyrimidines. In some embodiments, all purines of the sense strand comprise 2′ fluoro modified purines, and all pyrimidines of the sense strand comprise 2′ methyl modified pyrimidines. In some embodiments, all purines of the sense strand comprise 2′ methyl modified purines, and all pyrimidines of the sense strand comprise 2′ fluoro modified pyrimidines. In some embodiments, all pyrimidines of the sense strand comprise 2′ fluoro modified pyrimidines, and all purines of the sense strand comprise a mixture of 2′ fluoro and 2′ methyl modified purines. In some embodiments, all pyrimidines of the sense strand comprise 2′ methyl modified pyrimidines, and all purines of the sense strand comprise a mixture of 2′ fluoro and 2′ methyl modified purines. In some embodiments, all pyrimidines of the sense strand comprise 2′ fluoro modified pyrimidines, and all purines of the sense strand comprise 2′ methyl modified purines. In some embodiments, all pyrimidines of the sense strand comprise 2′ methyl modified pyrimidines, and all purines of the sense strand comprise 2′ fluoro modified purines.

[0230] In some embodiments, purines of the antisense strand comprise 2′ fluoro modified purines. In some embodiments, purines of the antisense strand comprise 2′ methyl modified purines. In some embodiments, purines of the antisense strand comprise a mixture of 2′ fluoro and 2′ methyl modified purines. In some embodiments, all purines of the antisense strand comprise 2′ fluoro modified purines. In some embodiments, all purines of the antisense strand comprise 2′ methyl modified purines. In some embodiments, all purines of the antisense strand comprise a mixture of 2′ fluoro and 2′ methyl modified purines.

[0231] In some embodiments, pyrimidines of the antisense strand comprise 2′ fluoro modified pyrimidines. In some embodiments, pyrimidines of the antisense strand comprise 2′ methyl modified pyrimidines. In some embodiments, pyrimidines of the antisense strand comprise a mixture of 2′ fluoro and 2′ methyl modified pyrimidines. In some embodiments, all pyrimidines of the antisense strand comprise 2′ fluoro modified pyrimidines. In some embodiments, all pyrimidines of the antisense strand comprise 2′ methyl modified pyrimidines. In some embodiments, all pyrimidines of the antisense strand comprise a mixture of 2′ fluoro and 2′ methyl modified pyrimidines.

[0232] In some embodiments, purines of the antisense strand comprise 2′ fluoro modified purines, and pyrimidines of the antisense strand comprise a mixture of 2′ fluoro and 2′ methyl modified pyrimidines. In some embodiments, purines of the antisense strand comprise 2′ methyl modified purines, and pyrimidines of the antisense strand comprise a mixture of 2′ fluoro and 2′ methyl modified pyrimidines. In some embodiments, purines of the antisense strand comprise 2′ fluoro modified purines, and pyrimidines of the antisense strand comprise 2′ methyl modified pyrimidines. In some embodiments, purines of the antisense strand comprise 2′ methyl modified purines, and pyrimidines of the antisense strand comprise 2′ fluoro modified pyrimidines. In some embodiments, pyrimidines of the antisense strand comprise 2′ fluoro modified pyrimidines, and purines of the antisense strand comprise a mixture of 2′ fluoro and 2′ methyl modified purines. In some embodiments, pyrimidines of the antisense strand comprise 2′ methyl modified pyrimidines, and purines of the antisense strand comprise a mixture of 2′ fluoro and 2′ methyl modified purines. In some embodiments, pyrimidines of the antisense strand comprise 2′ fluoro modified pyrimidines, and purines of the antisense strand comprise 2′ methyl modified purines. In some embodiments, pyrimidines of the antisense strand comprise 2′ methyl modified pyrimidines, and purines of the antisense strand comprise 2′ fluoro modified purines.

[0233] In some embodiments, all purines of the antisense strand comprise 2′ fluoro modified purines, and all pyrimidines of the antisense strand comprise a mixture of 2′ fluoro and 2′ methyl modified pyrimidines. In some embodiments, all purines of the antisense strand comprise 2′ methyl modified purines, and all pyrimidines of the antisense strand comprise a mixture of 2′ fluoro and 2′ methyl modified pyrimidines. In some embodiments, all purines of the antisense strand comprise 2′ fluoro modified purines, and all pyrimidines of the antisense strand comprise 2′ methyl modified pyrimidines. In some embodiments, all purines of the antisense strand comprise 2′ methyl modified purines, and all pyrimidines of the antisense strand comprise 2′ fluoro modified pyrimidines. In some embodiments, all pyrimidines of the antisense strand comprise 2′ fluoro modified pyrimidines, and all purines of the antisense strand comprise a mixture of 2′ fluoro and 2′ methyl modified purines. In some embodiments, all pyrimidines of the antisense strand comprise 2′ methyl modified pyrimidines, and all purines of the antisense strand comprise a mixture of 2′ fluoro and 2′ methyl modified purines. In some embodiments, all pyrimidines of the antisense strand comprise 2′ fluoro modified pyrimidines, and all purines of the antisense strand comprise 2′ methyl modified purines. In some embodiments, all pyrimidines of the antisense strand comprise 2′ methyl modified pyrimidines, and all purines of the antisense strand comprise 2′ fluoro modified purines.

[0234] In some cases, the sense strand of any of the siRNAs comprises siRNA with a particular modification pattern. In some embodiments of the modification pattern, position 9 counting from the 5′ end of the sense strand may have a 2′F modification. In some embodiments, when position 9 of the sense strand is a pyrimidine, then all purines in the sense strand have a 2′OMe modification. In some embodiments, when position 9 is the only pyrimidine between positions 5 and 11 of the sense stand, then position 9 is the only position with a 2′F modification in the sense strand. In some embodiments, when position 9 and only one other base between positions 5 and 11 of the sense strand are pyrimidines, then both of these pyrimidines are the only two positions with a 2′F modification in the sense strand. In some embodiments, when position 9 and only two other bases between positions 5 and 11 of the sense strand are pyrimidines, and those two other pyrimidines are in adjacent positions so that there would be not three 2′F modifications in a row, then any combination of 2′F modifications can be made that give three 2′F modifications in total. In some embodiments, when there are more than 2 pyrimidines between positions 5 and 11 of the sense strand, then all combinations of pyrimidines having the 2′F modification are allowed that have three to five 2′F modifications in total, provided that the sense strand does not have three 2′F modifications in a row. In some cases, the sense strand of any of the siRNAs comprises a modification pattern which conforms to any or all of these sense strand rules.

[0235] In some embodiments, when position 9 of the sense strand is a purine, then all purines in the sense strand have a 2′OMe modification. In some embodiments, when position 9 is the only purine between positions 5 and 11 of the sense stand, then position 9 is the only position with a 2′F modification in the sense strand. In some embodiments, when position 9 and only one other base between positions 5 and 11 of the sense strand are purines, then both of these purines are the only two positions with a 2′F modification in the sense strand. In some embodiments, when position 9 and only two other bases between positions 5 and 11 of the sense strand are purines, and those two other purines are in adjacent positions so that there would be not three 2′F modifications in a row, then any combination of 2′F modifications can be made that give three 2′F modifications in total. In some embodiments, when there are more than 2 purines between positions 5 and 11 of the sense strand, then all combinations of purines having the 2′F modification are allowed that have three to five 2′F modifications in total, provided that the sense strand does not have three 2′F modifications in a row. In some cases, the sense strand of any of the siRNAs comprises a modification pattern which conforms to any or all of these sense strand rules.

[0236] In some cases, position 9 of the sense strand can be a 2′deoxy. In these cases, 2′F and 2′OMe modifications may occur at the other positions of the sense strand. In some cases, the sense strand of any of the siRNAs comprises a modification pattern which conforms to these sense strand rules.

[0237] In some cases, the sense strand of any of the siRNAs comprises a modification pattern which conforms to these sense strand rules.

### 4. ASO Modification Patterns

[0238] In some embodiments, the composition comprises an oligonucleotide that inhibits the expression of ANGPTL4, wherein the oligonucleotide comprises an antisense oligonucleotide (ASO). In some embodiments, the ASO comprises modification pattern ASO1: 5′-nsnsnsnsnsdNsdNsdNsdNsdNsdNsdNsdNsdNsdNsnsnsnsnsn-3′, wherein “dN” is any deoxynucleotide, “n” is a 2′O-methyl or 2′O-methoxyethyl-modified nucleoside, and “s” is a phosphorothioate linkage. In some embodiments, the ASO comprises modification pattern 1S, 2S, 3S, 4S, 5S, 6S, 7S, 8S, 9S, 10S, 11S, 12S, 13S, 14S, 1AS, 2AS, 3AS, 4AS, 5AS, 6AS, 7AS, 8AS, 9AS, 10AS, or 11AS. In some embodiments, the ASO comprises DNA.

[0239] In some embodiments, the composition comprises an oligonucleotide that inhibits the expression of ANGPTL4, wherein the oligonucleotide comprises an antisense oligonucleotide (ASO). In some embodiments, the ASO comprises a nucleoside sequence comprising or consisting of the sequence of any one of SEQ ID NOs: 3709-13934, and modification pattern ASO1. In some embodiments, the ASO comprises a nucleoside sequence comprising or consisting of the sequence of any one of SEQ ID NOs: 3709-13934, or a nucleic acid sequence thereof having 1 or 2 nucleoside substitutions, additions, or deletions, and modification pattern ASO1. In some embodiments, the ASO comprises a nucleoside sequence comprising or consisting of the sequence of any one of SEQ ID NOs: 3709-13934, or a nucleic acid sequence thereof having 3 or 4 nucleoside substitutions, additions, or deletions, and modification pattern ASO1.

[0240] ASO1 modification pattern ASO1 may include a GalNAc ligand attached to the 3′ end. ASO1 modification pattern ASO1 may include a GalNAc ligand attached to the 5′ end.

### D. Formulations

[0241] In some embodiments, the composition is a pharmaceutical composition. In some embodiments, the composition is sterile. In some embodiments, the composition further comprises a pharmaceutically acceptable carrier.

[0242] In some embodiments, the pharmaceutically acceptable carrier comprises water. In some embodiments, the pharmaceutically acceptable carrier comprises a buffer. In some embodiments, the pharmaceutically acceptable carrier comprises a saline solution. In some embodiments, the pharmaceutically acceptable carrier comprises water, a buffer, or a saline solution. In some embodiments, the composition comprises a liposome. In some embodiments, the pharmaceutically acceptable carrier comprises liposomes, lipids, nanoparticles, proteins, protein-antibody complexes, peptides, cellulose, nanogel, or a combination thereof.

### II. Methods and Uses

[0243] Disclosed herein, in some embodiments, are methods of administering a composition described herein to a subject. Some embodiments relate to use a composition described herein, such as administering the composition to a subject.

[0244] Some embodiments relate to a method of treating a disorder in a subject in need thereof. Some embodiments relate to use of a composition described herein in the method of treatment. Some embodiments include administering a composition described herein to a subject with the disorder. In some embodiments, the administration treats the disorder in the subject. In some embodiments, the composition treats the disorder in the subject.

[0245] In some embodiments, the treatment comprises prevention, inhibition, or reversion of the disorder in the subject. Some embodiments relate to use of a composition described herein in the method of preventing, inhibiting, or reversing the disorder. Some embodiments relate to a method of preventing, inhibiting, or reversing a disorder a disorder in a subject in need thereof. Some embodiments include administering a composition described herein to a subject with the disorder. In some embodiments, the administration prevents, inhibits, or reverses the disorder in the subject. In some embodiments, the composition prevents, inhibits, or reverses the disorder in the subject.

[0246] Some embodiments relate to a method of preventing a disorder a disorder in a subject in need thereof. Some embodiments relate to use of a composition described herein in the method of preventing the disorder. Some embodiments include administering a composition described herein to a subject with the disorder. In some embodiments, the administration prevents the disorder in the subject. In some embodiments, the composition prevents the disorder in the subject.

[0247] Some embodiments relate to a method of inhibiting a disorder a disorder in a subject in need thereof. Some embodiments relate to use of a composition described herein in the method of inhibiting the disorder. Some embodiments include administering a composition described herein to a subject with the disorder. In some embodiments, the administration inhibits the disorder in the subject. In some embodiments, the composition inhibits the disorder in the subject.

[0248] Some embodiments relate to a method of reversing a disorder a disorder in a subject in need thereof. Some embodiments relate to use of a composition described herein in the method of reversing the disorder. Some embodiments include administering a composition described herein to a subject with the disorder. In some embodiments, the administration reverses the disorder in the subject. In some embodiments, the composition reverses the disorder in the subject.

### A. Disorders

[0249] Some embodiments of the methods described herein include treating a disorder in a subject in need thereof. In some embodiments, the disorder is a metabolic disorder. Examples of metabolic disorders include hyperlipidemia (for example, hypertriglyceridemia) and diabetes (for example, type II diabetes). In some embodiments, the metabolic disorder comprises hyperlipidemia. In some embodiments, the metabolic disorder comprises hypertriglyceridemia. In some embodiments, the metabolic disorder comprises familial chylomicronemia. In some embodiments, the metabolic disorder comprises hypertriglyceridemia in the context of familial chylomicronemia. In some embodiments, the metabolic disorder comprises pancreatitis. In some embodiments, the metabolic disorder comprises acute pancreatitis. In some embodiments, the metabolic disorder comprises hypertriglyceridemia and associated acute pancreatitis. In some embodiments, the metabolic disorder comprises diabetes. In some embodiments, the metabolic disorder comprises type 2 diabetes. In some embodiments, the metabolic disorder comprises a liver disease. An example of liver a disease includes a fatty liver disease. The fatty liver disease may include nonalcoholic fatty liver disease (NAFLD). The fatty liver disease may include non-alcoholic steatohepatitis (NASH). Some embodiments include a method of treating a metabolic disorder in a subject in need thereof, the method comprising administering to the subject a composition comprising an oligonucleotide that targets ANGPTL4.

[0250] In some embodiments, the disorder is a cardiometabolic disorder such as a cardiovascular disorder or a metabolic disorder. In some embodiments, the disorder is a cardiovascular disorder. Examples of cardiovascular disorders include heart disease, myocardial infarction, angina (for example, angina pectoris), and atherosclerosis. In some embodiments, the cardiovascular disorder comprises heart disease. In some embodiments, the cardiovascular disorder comprises myocardial infarction. In some embodiments, the cardiovascular disorder comprises angina pectoris. In some embodiments, the cardiovascular disorder comprises atherosclerosis. Some embodiments include a method of treating a cardiovascular disorder in a subject in need thereof, the method comprising administering to the subject a composition comprising an oligonucleotide that targets ANGPTL4.

### B. Subjects

[0251] Some embodiments of the methods described herein include treatment of a subject. Examples of subjects include vertebrates, animals, mammals, dogs, cats, cattle, rodents, mice, rats, primates, monkeys, and humans. In some embodiments, the subject is a vertebrate. In some embodiments, the subject is an animal. In some embodiments, the subject is a mammal. In some embodiments, the subject is a dog. In some embodiments, the subject is a cat. In some embodiments, the subject is a cattle. In some embodiments, the subject is a mouse. In some embodiments, the subject is a rat. In some embodiments, the subject is a primate. In some embodiments, the subject is a monkey. In some embodiments, the subject is an animal, a mammal, a dog, a cat, cattle, a rodent, a mouse, a rat, a primate, or a monkey. In some embodiments, the subject is a human.

[0252] In some embodiments, the subject has a body mass index (BMI) of 25, 26, 27, 28, 29, 30, 31, 32, 33, 34, 35, 36, 37, 38, 39, 40, 41, 42, 43, 44, 45, 46, 47, 48, 49, 50, or more, or a range defined by any two of the aforementioned integers. In some embodiments, the subject is overweight. In some embodiments, the subject has a BMI of 25 or more. In some embodiments, the subject has a BMI of 25-29. In some embodiments, the subject is obese. In some embodiments, the subject has a BMI of 30 or more. In some embodiments, the subject has a BMI of 30-39. In some embodiments, the subject has a BMI of 40-50. In some embodiments, the subject has a BMI of 25-50.

[0253] In some embodiments, the subject is ≥90 years of age. In some embodiments, the subject is ≥85 years of age. In some embodiments, the subject is ≥80 years of age. In some embodiments, the subject is ≥70 years of age. In some embodiments, the subject is ≥60 years of age. In some embodiments, the subject is ≥50 years of age. In some embodiments, the subject is ≥40 years of age. In some embodiments, the subject is ≥30 years of age. In some embodiments, the subject is ≥20 years of age. In some embodiments, the subject is ≥10 years of age. In some embodiments, the subject is ≥1 years of age. In some embodiments, the subject is ≥0 years of age.

[0254] In some embodiments, the subject is ≤100 years of age. In some embodiments, the subject is ≤90 years of age. In some embodiments, the subject is ≤85 years of age. In some embodiments, the subject is ≤80 years of age. In some embodiments, the subject is ≤70 years of age. In some embodiments, the subject is ≤60 years of age. In some embodiments, the subject is ≤50 years of age. In some embodiments, the subject is ≤40 years of age. In some embodiments, the subject is ≤30 years of age. In some embodiments, the subject is ≤20 years of age. In some embodiments, the subject is ≤10 years of age. In some embodiments, the subject is ≤1 years of age.

[0255] In some embodiments, the subject is between 0 and 100 years of age. In some embodiments, the subject is between 20 and 90 years of age. In some embodiments, the subject is between 30 and 80 years of age. In some embodiments, the subject is between 40 and 75 years of age. In some embodiments, the subject is between 50 and 70 years of age. In some embodiments, the subject is between 40 and 85 years of age.

### C. Baseline Measurements

[0256] Some embodiments of the methods described herein include obtaining a baseline measurement from a subject. For example, in some embodiments, a baseline measurement is obtained from the subject prior to treating the subject.

[0257] In some embodiments, the baseline measurement is obtained by performing an assay such as an immunoassay, a colorimetric assay, or a fluorescence assay, on the sample obtained from the subject. In some embodiments, the baseline measurement is obtained by an immunoassay, a colorimetric assay, or a fluorescence assay. In some embodiments, the baseline measurement is obtained by PCR.

[0258] In some embodiments, the baseline measurement is a baseline triglyceride measurement. In some embodiments, the baseline triglyceride measurement is a baseline triglyceride concentration (for example, mg/dL). In some embodiments, the baseline triglyceride measurement is a baseline circulating triglyceride measurement. In some embodiments, the baseline triglyceride measurement is obtained by an assay such as an immunoassay, a colorimetric assay, or a fluorescence assay.

[0259] In some embodiments, the baseline measurement is a baseline cholesterol measurement. In some embodiments, the baseline cholesterol measurement is a baseline cholesterol concentration. In some embodiments, the baseline cholesterol concentration is a baseline total cholesterol concentration. In some embodiments, the baseline cholesterol measurement is a baseline circulating cholesterol measurement. In some embodiments, the baseline cholesterol measurement is a baseline low density lipoprotein (LDL) measurement. In some embodiments, the baseline cholesterol measurement is a baseline very low density lipoprotein (VLDL) measurement. In some embodiments, the baseline cholesterol measurement is obtained by an assay such as an immunoassay, a colorimetric assay, or a fluorescence assay.

[0260] In some embodiments, the baseline measurement is a baseline HDL measurement. In some embodiments, the baseline HDL measurement is a baseline HDL concentration. In some embodiments, the baseline HDL measurement is indicated relative to a baseline total cholesterol measurement. In some embodiments, the baseline HDL measurement is a baseline circulating HDL measurement. In some embodiments, the baseline HDL measurement is obtained by an assay such as an immunoassay, a colorimetric assay, or a fluorescence assay.

[0261] In some embodiments, the baseline measurement is a baseline glucose measurement. In some embodiments, the baseline glucose measurement is a baseline glucose concentration (for example, mg/dL). In some embodiments, the baseline glucose measurement comprises a baseline glucose concentration. In some embodiments, the baseline glucose measurement is a baseline circulating glucose measurement. In some embodiments, the baseline glucose measurement is obtained by an assay such as an immunoassay, a colorimetric assay, or a fluorescence assay. In some embodiments, the baseline glucose measurement is obtained

[0262] In some embodiments, the baseline glucose measurement comprises a baseline glucose tolerance test. In some embodiments, the baseline glucose tolerance test comprises administering glucose to the subject, and then obtaining multiple baseline glucose measurements over time after administering the glucose to the subject. In some embodiments, the glucose is administered orally. In some embodiments, the glucose is administered by injection. In some embodiments, the multiple baseline glucose measurements are integrated into a baseline glucose area under the curve (AUC) measurement. In some embodiments, the baseline glucose tolerance test is performed on the subject in a fasted state such as after an overnight fast. In some embodiments, the baseline glucose measurement comprises a baseline glucose measurement other than a baseline glucose tolerance test.

[0263] In some embodiments, the baseline measurement is a baseline insulin measurement. In some embodiments, the baseline insulin measurement is a baseline insulin sensitivity measurement. In some embodiments, the baseline insulin sensitivity measurement is obtained using a glucose clamp technique such as a hyperinsulinemic euglycemic clamp. In some embodiments, the baseline insulin measurement is a baseline insulin concentration. In some embodiments, the baseline insulin measurement comprises a baseline insulin concentration. In some embodiments, the baseline insulin measurement is a baseline circulating insulin measurement. In some embodiments, the baseline insulin measurement is obtained by an assay such as an immunoassay (for example, an ELISA or an immunoblot), a colorimetric assay, or a fluorescence assay. In some embodiments, the baseline insulin sensitivity measurement comprises a baseline glucose tolerance test. In some embodiments, the baseline insulin sensitivity measurement comprises a baseline insulin sensitivity measurement other than a baseline glucose tolerance test.

[0264] In some embodiments, the baseline insulin measurement comprises a baseline insulin response test. In some embodiments, the baseline insulin response test comprises administering glucose to the subject and then obtaining multiple baseline insulin measurements over time after administering the glucose to the subject. In some embodiments, the glucose is administered orally. In some embodiments, the glucose is administered by injection. In some embodiments, the multiple baseline insulin measurements are integrated into a baseline insulin AUC measurement. In some embodiments, the baseline insulin response test is performed on the subject in a fasted state such as after an overnight fast.

[0265] In some embodiments, the baseline insulin measurement comprises a baseline glucose response test. In some embodiments, the baseline glucose response test comprises administering insulin to the subject, and then obtaining multiple baseline glucose measurements over time after administering the insulin to the subject. In some embodiments, the insulin is administered by injection. In some embodiments, the multiple baseline glucose measurements are integrated into a baseline glucose AUC measurement. In some embodiments, the multiple baseline glucose measurements are obtained with a glucometer. In some embodiments, the glucose response test is performed on the subject in a fasted state such as after an overnight fast. In some embodiments, the glucose response test is performed on the subject after administering food, drink, or glucose to the subject.

[0266] In some embodiments, the baseline measurement is a baseline liver steatosis measurement. In some embodiments, the baseline liver steatosis measurement is a baseline liver fat percentage (LFP) measurement. In some embodiments, the baseline measurement is a baseline LFP measurement. In some embodiments, the baseline LFP measurement is indicated as a mass/mass percentage of fat/total tissue. In some embodiments, the baseline LFP measurement is indicated as a mass/volume percentage of fat/total tissue. In some embodiments, the baseline LFP measurement is indicated as a volume/mass percentage of fat/total tissue. In some embodiments, the baseline LFP measurement is indicated as a volume/volume percentage of fat/total tissue. In some embodiments, the baseline LFP measurement is indicated as a score. In some embodiments, the baseline LFP measurement is obtained noninvasively. In some embodiments, the baseline LFP measurement is obtained by a medical imaging device. In some embodiments, the baseline LFP measurement is obtained by a device such as a medical resonance imaging (MRI) device, a magnetic resonance spectroscopy device, a computed tomography device, a controlled attenuation parameter (CAP), a transient elastography device, or an ultrasound device. In some embodiments, the baseline LFP measurement is obtained in a liver sample. In some embodiments, the baseline LFP measurement comprises a baseline liver triglyceride measurement. In some embodiments, the baseline LFP measurement is obtained by an assay such as an immunoassay, a colorimetric assay, or a fluorescence assay. In some embodiments, the baseline LFP measurement or the baseline LFP measurement is obtained using a scoring system upon a visual inspection of a sample such as a histological sample. In some embodiments, the baseline LFP measurement or the baseline LFP measurement is obtained using a stain with an affinity to fats, such as a lysochrome diazo dye.

[0267] In some embodiments, the baseline liver steatosis measurement includes a baseline non-alcoholic fatty liver disease (NAFLD) activity score. In some embodiments, the baseline measurement is a baseline NAFLD activity score. In some embodiments, the baseline NAFLD activity score comprises a numerical value such as a number of points. In some embodiments, the numerical value is 0, 1, 2, 3, 4, 5, 6, 7, or 8, or a range defined by any two of the aforementioned numerical values. In some embodiments, the numerical value is 0-8. In some embodiments, the baseline NAFLD activity score comprises a steatosis grade such as a baseline liver fat percentage. In some embodiments, a steatosis grade <5% comprises 0 points in the baseline NAFLD activity score. In some embodiments, a steatosis grade of 5-33% comprises 1 point in the baseline NAFLD activity score. In some embodiments, a steatosis grade of 34-66% comprises 2 points in the baseline NAFLD activity score. In some embodiments, a steatosis grade of >66% comprises 3 points in the baseline NAFLD activity score. In some embodiments, the baseline NAFLD activity score comprises a lobular inflammation grade. In some embodiments, the lobular inflammation grade comprises an assessment of inflammatory foci. In some embodiments, a lobular inflammation grade comprising 0 foci comprises 0 points in the baseline NAFLD activity score. In some embodiments, a lobular inflammation grade comprising 1 focus per a field (such as a 20× field or a 200× field) comprises 1 point in the baseline NAFLD activity score. In some embodiments, a lobular inflammation grade comprising 2-4 foci per field comprises 2 points in the baseline NAFLD activity score. In some embodiments, a lobular inflammation grade comprising >4 foci per field comprises 3 points in the baseline NAFLD activity score. In some embodiments, the baseline NAFLD activity score comprises a liver cell injury grade such as an amount of ballooning cells. In some embodiments, a liver cell injury comprising no ballooning cells comprises 0 points in the baseline NAFLD activity score. In some embodiments, a liver cell injury comprising some new balloon cells comprises 1 points in the baseline NAFLD activity score. In some embodiments, a liver cell injury comprising many ballooning cells or prominent ballooning comprises 2 points in the baseline NAFLD activity score. In some embodiments, the baseline NAFLD activity score is obtained invasively, based on histology, and/or in a liver biopsy.

[0268] In some embodiments, the baseline measurement is a baseline ANGPTL4 protein measurement. In some embodiments, the baseline ANGPTL4 protein measurement comprises a baseline ANGPTL4 protein level. In some embodiments, the baseline ANGPTL4 protein level is indicated as a mass or percentage of ANGPTL4 protein per sample weight. In some embodiments, the baseline ANGPTL4 protein level is indicated as a mass or percentage of ANGPTL4 protein per sample volume. In some embodiments, the baseline ANGPTL4 protein level is indicated as a mass or percentage of ANGPTL4 protein per total protein within the sample. In some embodiments, the baseline ANGPTL4 protein measurement is a baseline cell (e.g. hepatocyte) ANGPTL4 protein measurement. In some embodiments, the baseline ANGPTL4 protein measurement is a baseline tissue (e.g. liver tissue) ANGPTL4 protein measurement. In some embodiments, the baseline ANGPTL4 protein measurement is a baseline circulating ANGPTL4 protein measurement. In some embodiments, the baseline ANGPTL4 protein measurement is obtained by an assay such as an immunoassay, a colorimetric assay, or a fluorescence assay.

[0269] In some embodiments, the baseline measurement is a baseline ANGPTL4 mRNA measurement. In some embodiments, the baseline ANGPTL4 mRNA measurement comprises a baseline ANGPTL4 mRNA level. In some embodiments, the baseline ANGPTL4 mRNA level is indicated as a mass or percentage of ANGPTL4 mRNA per sample weight. In some embodiments, the baseline ANGPTL4 mRNA level is indicated as a mass or percentage of ANGPTL4 mRNA per sample volume. In some embodiments, the baseline ANGPTL4 mRNA level is indicated as a mass or percentage of ANGPTL4 mRNA per total mRNA within the sample. In some embodiments, the baseline ANGPTL4 mRNA level is indicated as a mass or percentage of ANGPTL4 mRNA per total nucleic acids within the sample. In some embodiments, the baseline ANGPTL4 mRNA level is indicated relative to another mRNA level, such as an mRNA level of a housekeeping gene, within the sample. In some embodiments, the baseline ANGPTL4 mRNA measurement is obtained by an assay such as a polymerase chain reaction (PCR) assay. In some embodiments, the PCR comprises quantitative PCR (qPCR). In some embodiments, the PCR comprises reverse transcription of the ANGPTL4 mRNA.

[0270] Some embodiments of the methods described herein include obtaining a sample from a subject. In some embodiments, the baseline measurement is obtained in a sample obtained from the subject. In some embodiments, the sample is obtained from the subject prior to administration or treatment of the subject with a composition described herein. In some embodiments, a baseline measurement is obtained in a sample obtained from the subject prior to administering the composition to the subject. In some embodiments, the sample is obtained from the subject in a fasted state. In some embodiments, the sample is obtained from the subject after an overnight fasting period. In some embodiments, the sample is obtained from the subject in a fed state.

[0271] In some embodiments, the sample comprises a fluid. In some embodiments, the sample is a fluid sample. In some embodiments, the sample is a blood, plasma, or serum sample. In some embodiments, the sample comprises blood. In some embodiments, the sample is a blood sample. In some embodiments, the sample is a whole-blood sample. In some embodiments, the blood is fractionated or centrifuged. In some embodiments, the sample comprises plasma. In some embodiments, the sample is a plasma sample. In some embodiments, the sample comprises serum. In some embodiments, the sample is a serum sample. For example, the baseline triglyceride 33 measurement, the baseline cholesterol measurement, the baseline HDL measurement, the baseline glucose measurement, the baseline insulin measurement, or the baseline ANGPTL4 protein measurement may be obtained in a serum sample from the patient.

[0272] In some embodiments, the sample comprises a tissue. In some embodiments, the sample is a tissue sample. In some embodiments, the sample comprises liver tissue. In some embodiments, the sample is a liver sample. In some embodiments, the sample comprises adipose tissue. In some embodiments, the sample is an adipose sample. In some embodiments, the sample comprises pancreatic tissue. In some embodiments, the sample comprises a pancreas sample. For example, the baseline ANGPTL4 mRNA measurement, or the baseline ANGPTL4 protein measurement, may be obtained in a liver or adipose sample from the patient. In some embodiments, the sample comprises intestinal tissue such as small intestinal tissue. In some embodiments, the sample is a small intestine sample. In some embodiments, the sample comprises lymph node tissue such as mesenteric lymph node tissue. In some embodiments, the sample is a mesenteric lymph node sample. In some embodiments, the sample comprises cardiac tissue such as ventricular or atrial tissue. In some embodiments, the sample is a cardiac sample. In some embodiments, the tissue sample comprises liver, adipose, small intestine, mesenteric lymph node, or cardiac tissue. In some embodiments, the tissue sample comprises brown adipose tissue, white adipose tissue, kidney tissue, or muscle tissue.

### D. Effects

[0273] In some embodiments, the composition or administration of the composition affects a measurement such as a triglyceride measurement, a cholesterol measurement, an HDL measurement, a glucose measurement, an insulin measurement, a liver steatosis measurement, an ANGPTL4 protein measurement (for example, circulating or tissue ANGPTL4 protein levels), or an ANGPTL4 mRNA measurement, relative to the baseline measurement.

[0274] Some embodiments of the methods described herein include obtaining the measurement from a subject. For example, the measurement may be obtained from the subject after treating the subject. In some embodiments, the measurement is obtained in a second sample (such as a fluid or tissue sample described herein) obtained from the subject after the composition is administered to the subject. In some embodiments, the measurement is an indication that the disorder has been treated.

[0275] In some embodiments, the measurement is obtained by an assay as described herein. For example, the assay may comprise an immunoassay, a colorimetric assay, a fluorescence assay, or a PCR assay.

[0276] In some embodiments, the measurement is obtained within 1 week, within 2 weeks, within 3 weeks, within 1 month, within 2 months, within 3 months, within 6 months, within 1 year, within 2 years, within 3 years, within 4 years, or within 5 years after the administration of the composition. In some embodiments, the measurement is obtained after 1 week, after 2 weeks, after 3 weeks, after 1 month, after 2 months, after 3 months, after 6 months, after 1 year, after 2 years, after 3 years, after 4 years, or after 5 years, following the administration of the composition.

[0277] In some embodiments, the measurement is a triglyceride measurement. In some embodiments, the triglyceride measurement is a triglyceride concentration (for example, mg/dL). In some embodiments, the triglyceride measurement is a circulating triglyceride measurement. In some embodiments, the triglyceride measurement is obtained by an assay such as an immunoassay, a colorimetric assay, or a fluorescence assay.

[0278] In some embodiments, the composition reduces the triglyceride measurement relative to the baseline triglyceride measurement. In some embodiments, the composition reduces circulating triglycerides relative to the baseline triglyceride measurement. In some embodiments, the reduced triglycerides are measured in a second sample obtained from the subject after administering the composition to the subject.

[0279] In some embodiments, the triglyceride measurement is decreased by about 2.5% or more, about 5% or more, or about 7.5% or more, relative to the baseline triglyceride measurement. In some embodiments, the triglyceride measurement is decreased by about 10% or more, relative to the baseline triglyceride measurement. In some embodiments, the triglyceride measurement is decreased by about 20% or more, about 30% or more, about 40% or more, about 50% or more, about 60% or more, about 70% or more, about 80% or more, about 90% or more, or about 100%, relative to the baseline triglyceride measurement. In some embodiments, the triglyceride measurement is decreased by no more than about 2.5%, no more than about 5%, or no more than about 7.5%, relative to the baseline triglyceride measurement. In some embodiments, the triglyceride measurement is decreased by no more than about 10%, relative to the baseline triglyceride measurement. In some embodiments, the triglyceride measurement is decreased by no more than about 20%, no more than about 30%, no more than about 40%, no more than about 50%, no more than about 60%, no more than about 70%, no more than about 80%, no more than about 90%, or no more than about 100% relative to the baseline triglyceride measurement. In some embodiments, the triglyceride measurement is decreased by 2.5%, 5%, 7.5%, 10%, 20%, 30%, 40%, 50%, 60%, 70%, 80%, 90%, 100%, or by a range defined by any of the two aforementioned percentages.

[0280] In some embodiments, the measurement is a cholesterol measurement. In some embodiments, the cholesterol measurement is a total cholesterol measurement. In some embodiments, the cholesterol measurement is a cholesterol concentration. In some embodiments, the cholesterol concentration is a total cholesterol concentration. In some embodiments, the cholesterol measurement is a circulating cholesterol measurement. In some embodiments, the cholesterol measurement is a low density lipoprotein (LDL) measurement. In some embodiments, the cholesterol measurement is a very low density lipoprotein (VLDL) measurement. In some embodiments, the cholesterol measurement is obtained by an assay such as an immunoassay, a colorimetric assay, or a fluorescence assay.

[0281] In some embodiments, the composition reduces the cholesterol measurement relative to the baseline cholesterol measurement. In some embodiments, the composition reduces circulating cholesterol relative to the baseline cholesterol measurement. In some embodiments, the reduced cholesterol is measured in a second sample obtained from the subject after administering the composition to the subject.

[0282] In some embodiments, the cholesterol measurement is decreased by about 2.5% or more, about 5% or more, or about 7.5% or more, relative to the baseline cholesterol measurement. In some embodiments, the cholesterol measurement is decreased by about 10% or more, relative to the baseline cholesterol measurement. In some embodiments, the cholesterol measurement is decreased by about 20% or more, about 30% or more, about 40% or more, about 50% or more, about 60% or more, about 70% or more, about 80% or more, about 90% or more, or about 100%, relative to the baseline cholesterol measurement. In some embodiments, the cholesterol is decreased by no more than about 2.5%, no more than about 5%, or no more than about 7.5%, relative to the baseline cholesterol measurement. In some embodiments, the cholesterol is decreased by no more than about 10%, relative to the baseline cholesterol measurement. In some embodiments, the cholesterol is decreased by no more than about 20%, no more than about 30%, no more than about 40%, no more than about 50%, no more than about 60%, no more than about 70%, no more than about 80%, no more than about 90%, or no more than about 100% relative to the baseline cholesterol measurement. In some embodiments, the cholesterol measurement is decreased by 2.5%, 5%, 7.5%, 10%, 20%, 30%, 40%, 50%, 60%, 70%, 80%, 90%, 100%, or by a range defined by any of the two aforementioned percentages.

[0283] In some embodiments, the measurement is an HDL measurement. In some embodiments, the HDL measurement is an HDL concentration. In some embodiments, the HDL measurement is indicated relative to a total cholesterol measurement. In some embodiments, the HDL measurement is a circulating HDL measurement. In some embodiments, the HDL measurement is obtained by an assay such as an immunoassay, a colorimetric assay, or a fluorescence assay.

[0284] In some embodiments, the composition reduces the HDL measurement relative to the baseline HDL measurement. In some embodiments, the composition increases circulating HDL relative to the baseline HDL measurement. In some embodiments, the increased HDL is measured in a second sample obtained from the subject after administering the composition to the subject.

[0285] In some embodiments, the HDL measurement is increased by about 2.5% or more, about 5% or more, or about 7.5% or more, relative to the baseline HDL measurement. In some embodiments, the HDL measurement is increased by about 10% or more, relative to the baseline HDL measurement. In some embodiments, the HDL measurement is increased by about 20% or more, about 30% or more, about 40% or more, about 50% or more, about 60% or more, about 70% or more, about 80% or more, about 90% or more, or about 100% or more relative to the baseline HDL measurement. In some embodiments, the HDL measurement is increased by about 200% or more, about 300% or more, about 400% or more, about 500% or more, about 600% or more, about 700% or more, about 800% or more, about 900% or more, or about 1000% or more, relative to the baseline HDL measurement. In some embodiments, the HDL measurement is increased by no more than about 2.5%, no more than about 5%, or no more than about 7.5%, relative to the baseline HDL measurement. In some embodiments, the HDL measurement is increased by no more than about 10%, relative to the baseline HDL measurement. In some embodiments, the HDL measurement is increased by no more than about 20%, no more than about 30%, no more than about 40%, no more than about 50%, no more than about 60%, no more than about 70%, no more than about 80%, no more than about 90%, or no more than about 100% relative to the baseline HDL measurement. In some embodiments, the HDL measurement is increased by no more than about 200%, no more than about 300%, no more than about 400%, no more than about 500%, no more than about 600%, no more than about 700%, no more than about 800%, no more than about 900%, or no more than about 1000%, relative to the baseline HDL measurement. In some embodiments, the HDL measurement is increased by 2.5%, 5%, 7.5%, 10%, 20%, 30%, 40%, 50%, 60%, 70%, 80%, 90%, 100%, 200% 300%, 400%, 500%, 600%, 700%, 800%, 900%, 1000%, or by a range defined by any of the two aforementioned percentages.

[0286] In some embodiments, the measurement is a glucose measurement. In some embodiments, the glucose measurement comprises a glucose concentration (for example, mg/dL). In some embodiments, the glucose measurement is a glucose concentration. In some embodiments, the glucose measurement is a circulating glucose measurement. In some embodiments, the glucose measurement is obtained by an assay such as an immunoassay, a colorimetric assay, or a fluorescence assay. In some embodiments, the glucose measurement is obtained using a glucometer.

[0287] In some embodiments, the glucose measurement comprises a glucose tolerance test. In some embodiments, the glucose tolerance test comprises administering glucose to the subject, and then obtaining multiple glucose measurements over time after administering the glucose to the subject. In some embodiments, the glucose is administered orally. In some embodiments, the glucose is administered by injection. In some embodiments, the multiple glucose measurements are integrated into a glucose area under the curve (AUC) measurement. In some embodiments, the glucose tolerance test is performed on the subject in a fasted state such as after an overnight fast. In some embodiments, the glucose measurement comprises a glucose measurement other than a glucose tolerance test.

[0288] In some embodiments, the composition reduces the glucose measurement relative to the baseline glucose measurement. In some embodiments, the composition reduces circulating glucose relative to the baseline glucose measurement. In some embodiments, the reduced glucose is measured in a second sample obtained from the subject after administering the composition to the subject. In some embodiments, the composition reduces one or more of the multiple glucose measurements of the glucose tolerance test relative to one or more of the multiple glucose measurements of the baseline glucose tolerance test. In some embodiments, the composition reduces the glucose AUC measurement relative to the baseline glucose AUC measurement.

[0289] In some embodiments, the glucose measurement is decreased by about 2.5% or more, about 5% or more, or about 7.5% or more, relative to the baseline glucose measurement. In some embodiments, the glucose measurement is decreased by about 10% or more, relative to the baseline glucose measurement. In some embodiments, the glucose measurement is decreased by about 20% or more, about 30% or more, about 40% or more, about 50% or more, about 60% or more, about 70% or more, about 80% or more, about 90% or more, or about 100%, relative to the baseline glucose measurement. In some embodiments, the glucose is decreased by no more than about 2.5%, no more than about 5%, or no more than about 7.5%, relative to the baseline glucose measurement. In some embodiments, the glucose is decreased by no more than about 10%, relative to the baseline glucose measurement. In some embodiments, the glucose is decreased by no more than about 20%, no more than about 30%, no more than about 40%, no more than about 50%, no more than about 60%, no more than about 70%, no more than about 80%, no more than about 90%, or no more than about 100% relative to the baseline glucose measurement. In some embodiments, the glucose measurement is decreased by 2.5%, 5%, 7.5%, 10%, 20%, 30%, 40%, 50%, 60%, 70%, 80%, 90%, 100%, or by a range defined by any of the two aforementioned percentages.

[0290] In some embodiments, the measurement is an insulin measurement. In some embodiments, the insulin measurement is an insulin sensitivity measurement. In some embodiments, the insulin sensitivity measurement is obtained using a glucose clamp technique such as a hyperinsulinemic euglycemic clamp. In some embodiments, the insulin measurement comprises an insulin concentration. In some embodiments, the insulin measurement is an insulin concentration. In some embodiments, the insulin measurement is a circulating insulin measurement. In some embodiments, the insulin measurement is obtained by an assay such as an immunoassay, a colorimetric assay, or a fluorescence assay. In some embodiments, the insulin sensitivity measurement comprises a glucose tolerance test. In some embodiments, the insulin sensitivity measurement comprises an insulin sensitivity measurement other than a glucose tolerance test.

[0291] In some embodiments, the insulin measurement comprises an insulin response test. In some embodiments, the insulin response test comprises administering glucose to the subject, and then obtaining multiple insulin measurements over time after administering the glucose to the subject. In some embodiments, the glucose is administered orally. In some embodiments, the glucose is administered by injection. In some embodiments, the multiple insulin measurements are integrated into an insulin AUC measurement. In some embodiments, the insulin response test is performed on the subject in a fasted state such as after an overnight fast.

[0292] In some embodiments, the insulin measurement comprises a glucose response test. In some embodiments, the glucose response test comprises administering insulin to the subject, and then obtaining multiple glucose measurements over time after administering the insulin to the subject. In some embodiments, the insulin is administered by injection. In some embodiments, the multiple glucose measurements are integrated into a glucose AUC measurement. In some embodiments, the multiple glucose measurements are measured with a glucometer. In some embodiments, the glucose response test is performed on the subject in a fasted state such as after an overnight fast. In some embodiments, the glucose response test is performed on the subject after administering food, drink, or glucose to the subject.

[0293] In some embodiments, the composition increases the insulin sensitivity relative to the baseline insulin sensitivity measurement. In some embodiments, the insulin sensitivity is increased by about 2.5% or more, about 5% or more, or about 7.5% or more, relative to the baseline insulin sensitivity measurement. In some embodiments, the insulin sensitivity is increased by about 10% or more, relative to the baseline insulin sensitivity measurement. In some embodiments, the insulin sensitivity is increased by about 20% or more, about 30% or more, about 40% or more, about 50% or more, about 60% or more, about 70% or more, about 80% or more, about 90% or more, or about 100% or more relative to the baseline insulin sensitivity measurement. In some embodiments, the insulin sensitivity is increased by about 200% or more, about 300% or more, about 400% or more, about 500% or more, about 600% or more, about 700% or more, about 800% or more, about 900% or more, or about 1000% or more, relative to the baseline insulin sensitivity measurement. In some embodiments, the insulin sensitivity is increased by no more than about 2.5%, no more than about 5%, or no more than about 7.5%, relative to the baseline insulin sensitivity measurement. In some embodiments, the insulin sensitivity is increased by no more than about 10%, relative to the baseline insulin sensitivity measurement. In some embodiments, the insulin sensitivity is increased by no more than about 20%, no more than about 30%, no more than about 40%, no more than about 50%, no more than about 60%, no more than about 70%, no more than about 80%, no more than about 90%, or no more than about 100% relative to the baseline insulin sensitivity measurement. In some embodiments, the insulin sensitivity is increased by no more than about 200%, no more than about 300%, no more than about 400%, no more than about 500%, no more than about 600%, no more than about 700%, no more than about 800%, no more than about 900%, or no more than about 1000%, relative to the baseline insulin sensitivity measurement. In some embodiments, the insulin sensitivity is increased by 2.5%, 5%, 7.5%, 10%, 20%, 30%, 40%, 50%, 60%, 70%, 80%, 90%, 100%, 200% 300%, 400%, 500%, 600%, 700%, 800%, 900%, 1000%, or by a range defined by any of the two aforementioned percentages.

[0294] In some embodiments, the composition reduces the insulin measurement relative to the baseline insulin measurement. In some embodiments, the composition reduces circulating insulin relative to the baseline insulin measurement. In some embodiments, the reduced insulin is measured in a second sample obtained from the subject after administering the composition to the subject. In some embodiments, the composition reduces the insulin AUC measurement relative to the baseline insulin AUC measurement.

[0295] In some embodiments, the insulin measurement is decreased by about 2.5% or more, about 5% or more, or about 7.5% or more, relative to the baseline insulin measurement. In some embodiments, the insulin measurement is decreased by about 10% or more, relative to the baseline insulin measurement. In some embodiments, the insulin measurement is decreased by about 20% or more, about 30% or more, about 40% or more, about 50% or more, about 60% or more, about 70% or more, about 80% or more, about 90% or more, or about 100%, relative to the baseline insulin measurement. In some embodiments, the insulin is decreased by no more than about 2.5%, no more than about 5%, or no more than about 7.5%, relative to the baseline insulin measurement. In some embodiments, the insulin is decreased by no more than about 10%, relative to the baseline insulin measurement. In some embodiments, the insulin is decreased by no more than about 20%, no more than about 30%, no more than about 40%, no more than about 50%, no more than about 60%, no more than about 70%, no more than about 80%, no more than about 90%, or no more than about 100% relative to the baseline insulin measurement. In some embodiments, the insulin measurement is decreased by 2.5%, 5%, 7.5%, 19%, 20%, 30%, 40%, 50%, 60%, 70%, 80%, 90%, 100%, or by a range defined by any of the two aforementioned percentages.

[0296] In some embodiments, the measurement is a liver steatosis measurement. In some embodiments, the liver steatosis measurement is a liver fat percentage (LFP) measurement. In some embodiments, the measurement is a LFP measurement. In some embodiments, the LFP measurement is indicated as a mass/mass percentage of fat/total tissue. In some embodiments, the LFP measurement is indicated as a mass/volume percentage of fat/total tissue. In some embodiments, the LFP measurement is indicated as a volume/mass percentage of fat/total tissue. In some embodiments, the LFP measurement is indicated as a volume/volume percentage of fat/total tissue. In some embodiments, the LFP measurement is indicated as a score. In some embodiments, the LFP measurement is obtained noninvasively. In some embodiments, the LFP measurement is obtained by a medical imaging device. In some embodiments, the LFP measurement is obtained by a device such as a medical resonance imaging (MRI) device, a magnetic resonance spectroscopy device, a computed tomography device, a controlled attenuation parameter (CAP), a transient elastography device, or an ultrasound device. In some embodiments, the LFP measurement is obtained in a second liver sample. In some embodiments, the LFP measurement comprises a liver triglyceride measurement. In some embodiments, the LFP measurement is obtained by an assay such as an immunoassay, a colorimetric assay, or a fluorescence assay. In some embodiments, the LFP measurement or the LFP measurement is obtained using a scoring system upon a visual inspection of a sample such as a histological sample. In some embodiments, the LFP measurement or the LFP measurement is obtained using a stain with an affinity to fats, such as a lysochrome diazo dye.

[0297] In some embodiments, the composition reduces the LFP measurement relative to the baseline LFP measurement. In some embodiments, the reduced LFP is measured in a second liver sample obtained from the subject after administering the composition to the subject. In some embodiments, the reduced LFP is measured directly in the subject after administering the composition to the subject. In some embodiments, the LFP measurement is decreased by about 2.5% or more, about 5% or more, or about 7.5% or more, relative to the baseline LFP measurement. In some embodiments, the LFP measurement is decreased by about 10% or more, relative to the baseline LFP measurement. In some embodiments, the LFP measurement is decreased by about 20% or more, about 30% or more, about 40% or more, about 50% or more, about 60% or more, about 70% or more, about 80% or more, about 90% or more, relative to the baseline LFP measurement. In some embodiments, the LFP measurement is decreased by no more than about 2.5%, no more than about 5%, or no more than about 7.5%, relative to the baseline LFP measurement. In some embodiments, the LFP measurement is decreased by no more than about 10%, relative to the baseline LFP measurement. In some embodiments, the LFP measurement is decreased by no more than about 20%, no more than about 30%, no more than about 40%, no more than about 50%, no more than about 60%, no more than about 70%, no more than about 80%, no more than about 90%, or no more than about 100% relative to the baseline LFP measurement. In some embodiments, the LFP measurement is decreased by 2.5%, 5%, 7.5%, 10%, 20%, 30%, 40%, 50%, 60%, 70%, 80%, 90%, or 100%, or by a range defined by any of the two aforementioned percentages.

[0298] In some embodiments, the liver steatosis measurement includes a non-alcoholic fatty liver disease (NAFLD) activity score. In some embodiments, the measurement is a NAFLD activity score. In some embodiments, the NAFLD activity score comprises a numerical value such as a number of points. In some embodiments, the numerical value is 0, 1, 2, 3, 4, 5, 6, 7, or 8, or a range defined by any two of the aforementioned numerical values. In some embodiments, the numerical value is 0-8. In some embodiments, the NAFLD activity score comprises a steatosis grade such as a liver fat percentage. In some embodiments, a steatosis grade <5% comprises 0 points in the NAFLD activity score. In some embodiments, a steatosis grade of 5-33% comprises 1 point in the NAFLD activity score. In some embodiments, a steatosis grade of 34-66% comprises 2 points in the NAFLD activity score. In some embodiments, a steatosis grade of >66% comprises 3 points in the NAFLD activity score. In some embodiments, the NAFLD activity score comprises a lobular inflammation grade. In some embodiments, the lobular inflammation grade comprises an assessment of inflammatory foci. In some embodiments, a lobular inflammation grade comprising 0 foci comprises 0 points in the NAFLD activity score. In some embodiments, a lobular inflammation grade comprising 1 focus per a field (such as a 20× field or a 200× field) comprises 1 point in the NAFLD activity score. In some embodiments, a lobular inflammation grade comprising 2-4 foci per field comprises 2 points in the NAFLD activity score. In some embodiments, a lobular inflammation grade comprising >4 foci per field comprises 3 points in the NAFLD activity score. In some embodiments, the NAFLD activity score comprises a liver cell injury grade such as an amount of ballooning cells. In some embodiments, a liver cell injury comprising no ballooning cells comprises 0 points in the NAFLD activity score. In some embodiments, a liver cell injury comprising some new balloon cells comprises 1 point in the NAFLD activity score. In some embodiments, a liver cell injury comprising many ballooning cells or prominent ballooning comprises 2 points in the NAFLD activity score. In some embodiments, the NAFLD activity score is obtained invasively, based on histology, and/or in a liver biopsy.

[0299] In some embodiments, the composition reduces the NAFLD activity score relative to the baseline NAFLD activity score. In some embodiments, the reduced NAFLD activity score is measured in a second liver sample obtained from the subject after administering the composition to the subject. In some embodiments, the NAFLD activity score is decreased by 1 relative to the baseline NAFLD activity score. In some embodiments, the NAFLD activity score is decreased by 2 relative to the baseline NAFLD activity score. In some embodiments, the NAFLD activity score is decreased by 3 relative to the baseline NAFLD activity score. In some embodiments, the NAFLD activity score is decreased by 4 relative to the baseline NAFLD activity score. In some embodiments, the NAFLD activity score is decreased by 5 relative to the baseline NAFLD activity score. In some embodiments, the NAFLD activity score is decreased by 6 relative to the baseline NAFLD activity score. In some embodiments, the NAFLD activity score is decreased by 7 relative to the baseline NAFLD activity score. In some embodiments, the NAFLD activity score is decreased by 8 relative to the baseline NAFLD activity score. In some embodiments, the NAFLD activity score is decreased by 1 or more, relative to the baseline NAFLD activity score. In some embodiments, the NAFLD activity score is decreased by 2 or more, 3 or more, 4 or more, 5 or more, 6 or more, 7 or more, or 8 or more, relative to the baseline NAFLD activity score. In some embodiments, the NAFLD activity score is decreased by no more than 1, no more than 2, no more than 3, no more than 4, no more than 5, no more than 6, no more than 7, or no more than 8, relative to the baseline NAFLD activity score. In some embodiments, the NAFLD activity score is decreased by 1, 2, 3, 4, 5, 6, 7, or 8, or by a range defined by any of the two aforementioned numbers.

[0300] In some embodiments, the measurement is an ANGPTL4 protein measurement. In some embodiments, the ANGPTL4 protein measurement comprises an ANGPTL4 protein level. In some embodiments, the ANGPTL4 protein level is indicated as a mass or percentage of ANGPTL4 protein per sample weight. In some embodiments, the ANGPTL4 protein level is indicated as a mass or percentage of ANGPTL4 protein per sample volume. In some embodiments, the ANGPTL4 protein level is indicated as a mass or percentage of ANGPTL4 protein per total protein within the sample. In some embodiments, the ANGPTL4 protein measurement is a cell (e.g. hepatocyte) ANGPTL4 protein measurement. In some embodiments, the ANGPTL4 protein measurement is a tissue (e.g. liver tissue) ANGPTL4 protein measurement. In some embodiments, the ANGPTL4 protein measurement is a circulating ANGPTL4 protein measurement. In some embodiments, the baseline ANGPTL4 protein measurement is obtained by an assay such as an immunoassay, a colorimetric assay, or a fluorescence assay.

[0301] In some embodiments, the composition reduces the ANGPTL4 protein measurement relative to the baseline ANGPTL4 protein measurement. In some embodiments, the composition reduces circulating ANGPTL4 protein levels relative to the baseline ANGPTL4 protein measurement. In some embodiments, the composition reduces tissue ANGPTL4 protein levels (such as liver tissue ANGPTL4 protein levels) relative to the baseline ANGPTL4 protein measurement. In some embodiments, the composition reduces cell ANGPTL4 protein levels (such as hepatocyte ANGPTL4 protein levels) relative to the baseline ANGPTL4 protein measurement. In some embodiments, the reduced ANGPTL4 protein levels are measured in a second sample obtained from the subject after administering the composition to the subject.

[0302] In some embodiments, the ANGPTL4 protein measurement is decreased by about 2.5% or more, about 5% or more, or about 7.5% or more, relative to the baseline ANGPTL4 protein measurement. In some embodiments, the ANGPTL4 protein measurement is decreased by about 10% or more, relative to the baseline ANGPTL4 protein measurement. In some embodiments, the ANGPTL4 protein measurement is decreased by about 20% or more, about 30% or more, about 40% or more, about 50% or more, about 60% or more, about 70% or more, about 80% or more, about 90% or more, or about 100%, relative to the baseline ANGPTL4 protein measurement. In some embodiments, the ANGPTL4 protein measurement is decreased by no more than about 2.5%, no more than about 5%, or no more than about 7.5%, relative to the baseline ANGPTL4 protein measurement. In some embodiments, the ANGPTL4 protein measurement is decreased by no more than about 10%, relative to the baseline ANGPTL4 protein measurement. In some embodiments, the ANGPTL4 protein measurement is decreased by no more than about 20%, no more than about 30%, no more than about 40%, no more than about 50%, no more than about 60%, no more than about 70%, no more than about 80%, no more than about 90%, or no more than about 100% relative to the baseline ANGPTL4 protein measurement. In some embodiments, the ANGPTL4 protein measurement is decreased by 2.5%, 5%, 7.5%, 19%, 20%, 30%, 40%, 50%, 60%, 70%, 80%, 90%, 100%, or by a range defined by any of the two aforementioned percentages.

[0303] In some embodiments, the measurement is an ANGPTL4 mRNA measurement. In some embodiments, the ANGPTL4 mRNA measurement comprises an ANGPTL4 mRNA level. In some embodiments, the ANGPTL4 mRNA level is indicated as a mass or percentage of ANGPTL4 mRNA per sample weight. In some embodiments, the ANGPTL4 mRNA level is indicated as a mass or percentage of ANGPTL4 mRNA per sample volume. In some embodiments, the ANGPTL4 mRNA level is indicated as a mass or percentage of ANGPTL4 mRNA per total mRNA within the sample. In some embodiments, the ANGPTL4 mRNA level is indicated as a mass or percentage of ANGPTL4 mRNA per total nucleic acids within the sample. In some embodiments, the ANGPTL4 mRNA level is indicated relative to another mRNA level, such as an mRNA level of a housekeeping gene, within the sample. In some embodiments, the ANGPTL4 mRNA measurement is obtained by an assay such as a PCR assay. In some embodiments, the PCR comprises qPCR. In some embodiments, the PCR comprises reverse transcription of the ANGPTL4 mRNA.

[0304] In some embodiments, the composition reduces the ANGPTL4 mRNA measurement relative to the baseline ANGPTL4 mRNA measurement. In some embodiments, the ANGPTL4 mRNA measurement is obtained in a second sample obtained from the subject after administering the composition to the subject. In some embodiments, the composition reduces ANGPTL4 mRNA levels relative to the baseline ANGPTL4 mRNA levels. In some embodiments, the reduced ANGPTL4 mRNA levels are measured in a second sample obtained from the subject after administering the composition to the subject. In some embodiments, the second sample is a liver sample. In some embodiments, the second sample is an adipose sample.

[0305] In some embodiments, the ANGPTL4 mRNA measurement is reduced by about 2.5% or more, about 5% or more, or about 7.5% or more, relative to the baseline ANGPTL4 mRNA measurement. In some embodiments, the ANGPTL4 mRNA measurement is decreased by about 10% or more, relative to the baseline ANGPTL4 mRNA measurement. In some embodiments, the ANGPTL4 mRNA measurement is decreased by about 20% or more, about 30% or more, about 40% or more, about 50% or more, about 60% or more, about 70% or more, about 80% or more, about 90% or more, or about 100%, relative to the baseline ANGPTL4 mRNA measurement. In some embodiments, the ANGPTL4 mRNA measurement is decreased by no more than about 2.5%, no more than about 5%, or no more than about 7.50%, relative to the baseline ANGPTL4 mRNA measurement. In some embodiments, the ANGPTL4 mRNA measurement is decreased by no more than about 10%, relative to the baseline ANGPTL4 mRNA measurement. In some embodiments, the ANGPTL4 mRNA measurement is decreased by no more than about 20%, no more than about 30%, no more than about 40%, no more than about 50%, no more than about 60%, no more than about 70%, no more than about 80%, no more than about 90%, or no more than about 100% relative to the baseline ANGPTL4 mRNA measurement. In some embodiments, the ANGPTL4 mRNA measurement is decreased by 2.5%, 5%, 7.5%, 10%, 20%, 30%, 40%, 50%, 60%, 70%, 80%, 90%, 100%, or by a range defined by any of the two aforementioned percentages.

### III. Definitions

[0306] Unless defined otherwise, all terms of art, notations and other technical and scientific terms or terminology used herein are intended to have the same meaning as is commonly understood by one of ordinary skill in the art to which the claimed subject matter pertains. In some cases, terms with commonly understood meanings are defined herein for clarity and/or for ready reference, and the inclusion of such definitions herein should not necessarily be construed to represent a substantial difference over what is generally understood in the art.

[0307] Throughout this application, various embodiments may be presented in a range format. It should be understood that the description in range format is merely for convenience and brevity and should not be construed as an inflexible limitation on the scope of the disclosure. Accordingly, the description of a range should be considered to have specifically disclosed all the possible subranges as well as individual numerical values within that range. For example, description of a range such as from 1 to 6 should be considered to have specifically disclosed subranges such as from 1 to 3, from 1 to 4, from 1 to 5, from 2 to 4, from 2 to 6, from 3 to 6 etc., as well as individual numbers within that range, for example, 1, 2, 3, 4, 5, and 6. This applies regardless of the breadth of the range.

[0308] As used in the specification and claims, the singular forms “a”, “an” and “the” include plural references unless the context clearly dictates otherwise. For example, the term “a sample” includes a plurality of samples, including mixtures thereof.

[0309] The terms “determining,” “measuring,” “evaluating,” “assessing,” “assaying,” and “analyzing” are often used interchangeably herein to refer to forms of measurement. The terms include determining if an element is present or not (for example, detection). These terms can include quantitative, qualitative or quantitative and qualitative determinations. Assessing can be relative or absolute. “Detecting the presence of” can include determining the amount of something present in addition to determining whether it is present or absent depending on the context.

[0310] The terms “subject,” and “patient” may be used interchangeably herein. A “subject” can be a biological entity containing expressed genetic materials. The biological entity can be a plant, animal, or microorganism, including, for example, bacteria, viruses, fungi, and protozoa. The subject can be a mammal. The mammal can be a human. The subject may be diagnosed or suspected of being at high risk for a disease. In some cases, the subject is not necessarily diagnosed or suspected of being at high risk for the disease.

[0311] As used herein, the term “about” a number refers to that number plus or minus 10% of that number. The term “about” a range refers to that range minus 10% of its lowest value and plus 10% of its greatest value.

[0312] As used herein, the terms “treatment” or “treating” are used in reference to a pharmaceutical or other intervention regimen for obtaining beneficial or desired results in the recipient. Beneficial or desired results include but are not limited to a therapeutic benefit and/or a prophylactic benefit. A therapeutic benefit may refer to eradication or amelioration of symptoms or of an underlying disorder being treated. Also, a therapeutic benefit can be achieved with the eradication or amelioration of one or more of the physiological symptoms associated with the underlying disorder such that an improvement is observed in the subject, notwithstanding that the subject may still be afflicted with the underlying disorder. A prophylactic effect includes delaying, preventing, or eliminating the appearance of a disease or condition, delaying or eliminating the onset of symptoms of a disease or condition, slowing, halting, or reversing the progression of a disease or condition, or any combination thereof. For prophylactic benefit, a subject at risk of developing a particular disease, or to a subject reporting one or more of the physiological symptoms of a disease may undergo treatment, even though a diagnosis of this disease may not have been made.

[0313] The section headings used herein are for organizational purposes only and are not to be construed as limiting the subject matter described.

### IV. Sequence Information

[0314] Some embodiments include one or more nucleic acid sequences in the following tables:

TABLE 1.1
Sequence Information

| SEQ ID NO: | Description of Examples |
|---|---|
| 1-1854 | ANGPTL4 siRNA oligonucleotide sense strand sequences |
| 1855-3708 | ANGPTL4 siRNA oligonucleotide antisense strand sequences |
| 3709-13934 | ANGPTL4 ASO sequences |
| 13935 | Full-length human ANGPTL4 human mRNA sequence (GenBank Acc.# NM_139314.3) |
| 13936 | Full-length ANGPTL4 human pre-mRNA sequence (NC_000019.10: 8364129-8374373) |
| 13937-13944 | Sequences for siRNA sense strands targeting mouse ANGPTL4 |
| 13945-13952 | Sequences for siRNA antisense strands targeting mouse ANGPTL4 |
| 13953 | Non-targeting control ASO oligonucleotide sequence |
| 13954-13959 | Modification pattern 1S to 6S |
| 13960-13968 | Modification pattern 1AS to 9AS |
| 13969 | Modification pattern ASO1 |
| 13970-13977 | ANGPTL4 siRNA oligonucleotide sense strand sequences |
| 13978-13985 | ANGPTL4 siRNA oligonucleotide antisense strand sequences |
| 13986-14133 | Modified ANGPTL4 siRNA oligonucleotide sense strand sequences |
| 14134-14288 | Modified ANGPTL4 siRNA oligonucleotide antisense strand sequences |
| 14289-14290 | ETD00971 sense and antisense strands |
| 14291-14292 | ETD00959 sense and antisense strands |
| 14293-14295 | Modification pattern 7S to 9S |
| 14296-14297 | Modification pattern 10AS and 11AS |
| 14298 | Modified ANGPTL4 siRNA antisense strand sequence example |
| 14299 | Modified ANGPTL4 siRNA sense strand sequence example |
| 14300-14303 | Modified ANGPTL4 siRNA sense strand sequence examples |
| 14304-14307 | Modified ANGPTL4 siRNA antisense strand sequence examples |
| 14308-14314 | Modified ANGPTL4 siRNA sense strand sequence examples |
| 14315-14321 | Modified ANGPTL4 siRNA antisense strand sequence examples |
| 14322-14328 | Modification pattern 10S to 16S |
| 14329-14332 | Modification pattern 12AS and 15AS |

TABLE 1.2
Sequences

| SEQ | |
|---|---|
| ID | Sequence |
| NO: | (5′ to 3′) |
| 1 | AGAAGCCGAGCUGAGCGGA |
| 2 | GAAGCCGAGCUGAGCGGAU |
| 3 | AAGCCGAGCUGAGCGGAUC |
| 4 | AGCCGAGCUGAGCGGAUCC |
| 5 | GCCGAGCUGAGCGGAUCCU |
| 6 | CCGAGCUGAGCGGAUCCUC |
| 7 | CGAGCUGAGCGGAUCCUCA |
| 8 | GAGCUGAGCGGAUCCUCAC |
| 9 | AGCUGAGCGGAUCCUCACA |
| 10 | GCUGAGCGGAUCCUCACAC |
| 11 | CUGAGCGGAUCCUCACACG |
| 12 | UGAGCGGAUCCUCACACGA |
| 13 | GAGCGGAUCCUCACACGAC |
| 14 | AGCGGAUCCUCACACGACU |
| 15 | GCGGAUCCUCACACGACUG |
| 16 | CGGAUCCUCACACGACUGU |
| 17 | GGAUCCUCACACGACUGUG |
| 18 | GAUCCUCACACGACUGUGA |
| 19 | AUCCUCACACGACUGUGAU |
| 20 | UCCUCACACGACUGUGAUC |
| 21 | CCUCACACGACUGUGAUCC |
| 22 | CUCACACGACUGUGAUCCG |
| 23 | UCACACGACUGUGAUCCGA |
| 24 | CACACGACUGUGAUCCGAU |
| 25 | ACACGACUGUGAUCCGAUU |
| 26 | CACGACUGUGAUCCGAUUC |
| 27 | ACGACUGUGAUCCGAUUCU |
| 28 | CGACUGUGAUCCGAUUCUU |
| 29 | GACUGUGAUCCGAUUCUUU |
| 30 | ACUGUGAUCCGAUUCUUUC |
| 31 | CUGUGAUCCGAUUCUUUCC |
| 32 | UGUGAUCCGAUUCUUUCCA |
| 33 | GUGAUCCGAUUCUUUCCAG |
| 34 | UGAUCCGAUUCUUUCCAGC |
| 35 | GAUCCGAUUCUUUCCAGCG |
| 36 | AUCCGAUUCUUUCCAGCGG |
| 37 | UCCGAUUCUUUCCAGCGGC |
| 38 | CCGAUUCUUUCCAGCGGCU |
| 39 | CGAUUCUUUCCAGCGGCUU |
| 40 | GAUUCUUUCCAGCGGCUUC |
| 41 | AUUCUUUCCAGCGGCUUCU |
| 42 | UUCUUUCCAGCGGCUUCUG |
| 43 | UCUUUCCAGCGGCUUCUGC |
| 44 | CUUUCCAGCGGCUUCUGCA |
| 45 | UUUCCAGCGGCUUCUGCAA |
| 46 | UUCCAGCGGCUUCUGCAAC |
| 47 | UCCAGCGGCUUCUGCAACC |
| 48 | CCAGCGGCUUCUGCAACCA |
| 49 | CAGCGGCUUCUGCAACCAA |
| 50 | AGCGGCUUCUGCAACCAAG |
| 51 | GCGGCUUCUGCAACCAAGC |
| 52 | CGGCUUCUGCAACCAAGCG |
| 53 | GGCUUCUGCAACCAAGCGG |
| 54 | GCUUCUGCAACCAAGCGGG |
| 55 | CUUCUGCAACCAAGCGGGU |
| 56 | UUCUGCAACCAAGCGGGUC |
| 57 | UCUGCAACCAAGCGGGUCU |
| 58 | CUGCAACCAAGCGGGUCUU |
| 59 | UGCAACCAAGCGGGUCUUA |
| 60 | GCAACCAAGCGGGUCUUAC |
| 61 | CAACCAAGCGGGUCUUACC |
| 62 | AACCAAGCGGGUCUUACCC |
| 63 | ACCAAGCGGGUCUUACCCC |
| 64 | CCAAGCGGGUCUUACCCCC |
| 65 | CAAGCGGGUCUUACCCCCG |
| 66 | AAGCGGGUCUUACCCCCGG |
| 67 | AGCGGGUCUUACCCCCGGU |
| 68 | GCGGGUCUUACCCCCGGUC |
| 69 | CGGGUCUUACCCCCGGUCC |
| 70 | GGGUCUUACCCCCGGUCCU |
| 71 | GGUCUUACCCCCGGUCCUC |
| 72 | GUCUUACCCCCGGUCCUCC |
| 73 | UCUUACCCCCGGUCCUCCG |
| 74 | CUUACCCCCGGUCCUCCGC |
| 75 | UUACCCCCGGUCCUCCGCG |
| 76 | UACCCCCGGUCCUCCGCGU |
| 77 | ACCCCCGGUCCUCCGCGUC |
| 78 | CCCCCGGUCCUCCGCGUCU |
| 79 | CCCCGGUCCUCCGCGUCUC |
| 80 | CCCGGUCCUCCGCGUCUCC |
| 81 | CCGGUCCUCCGCGUCUCCA |
| 82 | CGGUCCUCCGCGUCUCCAG |
| 83 | GGUCCUCCGCGUCUCCAGU |
| 84 | GUCCUCCGCGUCUCCAGUC |
| 85 | UCCUCCGCGUCUCCAGUCC |
| 86 | CCUCCGCGUCUCCAGUCCU |
| 87 | CUCCGCGUCUCCAGUCCUC |
| 88 | UCCGCGUCUCCAGUCCUCG |
| 89 | CCGCGUCUCCAGUCCUCGC |
| 90 | CGCGUCUCCAGUCCUCGCA |
| 91 | GCGUCUCCAGUCCUCGCAC |
| 92 | CGUCUCCAGUCCUCGCACC |
| 93 | GUCUCCAGUCCUCGCACCU |
| 94 | UCUCCAGUCCUCGCACCUG |
| 95 | CUCCAGUCCUCGCACCUGG |
| 96 | UCCAGUCCUCGCACCUGGA |
| 97 | CCAGUCCUCGCACCUGGAA |
| 98 | CAGUCCUCGCACCUGGAAC |
| 99 | AGUCCUCGCACCUGGAACC |
| 100 | GUCCUCGCACCUGGAACCC |
| 101 | UCCUCGCACCUGGAACCCC |
| 102 | CCUCGCACCUGGAACCCCA |
| 103 | CUCGCACCUGGAACCCCAA |
| 104 | UCGCACCUGGAACCCCAAC |
| 105 | CGCACCUGGAACCCCAACG |
| 106 | GCACCUGGAACCCCAACGU |
| 107 | CACCUGGAACCCCAACGUC |
| 108 | ACCUGGAACCCCAACGUCC |
| 109 | CCUGGAACCCCAACGUCCC |
| 110 | CUGGAACCCCAACGUCCCC |
| 111 | UGGAACCCCAACGUCCCCG |
| 112 | GGAACCCCAACGUCCCCGA |
| 113 | GAACCCCAACGUCCCCGAG |
| 114 | AACCCCAACGUCCCCGAGA |
| 115 | ACCCCAACGUCCCCGAGAG |
| 116 | CCCCAACGUCCCCGAGAGU |
| 117 | CCCAACGUCCCCGAGAGUC |
| 118 | CCAACGUCCCCGAGAGUCC |
| 119 | CAACGUCCCCGAGAGUCCC |
| 120 | AACGUCCCCGAGAGUCCCC |
| 121 | ACGUCCCCGAGAGUCCCCG |
| 122 | CGUCCCCGAGAGUCCCCGA |
| 123 | GUCCCCGAGAGUCCCCGAA |
| 124 | UCCCCGAGAGUCCCCGAAU |
| 125 | CCCCGAGAGUCCCCGAAUC |
| 126 | CCCGAGAGUCCCCGAAUCC |
| 127 | CCGAGAGUCCCCGAAUCCC |
| 128 | CGAGAGUCCCCGAAUCCCC |
| 129 | GAGAGUCCCCGAAUCCCCG |
| 130 | AGAGUCCCCGAAUCCCCGC |
| 131 | GAGUCCCCGAAUCCCCGCU |
| 132 | AGUCCCCGAAUCCCCGCUC |
| 133 | GUCCCCGAAUCCCCGCUCC |
| 134 | UCCCCGAAUCCCCGCUCCC |
| 135 | CCCCGAAUCCCCGCUCCCA |
| 136 | CCCGAAUCCCCGCUCCCAG |
| 137 | CCGAAUCCCCGCUCCCAGG |
| 138 | CGAAUCCCCGCUCCCAGGC |
| 139 | GAAUCCCCGCUCCCAGGCU |
| 140 | AAUCCCCGCUCCCAGGCUA |
| 141 | AUCCCCGCUCCCAGGCUAC |
| 142 | UCCCCGCUCCCAGGCUACC |
| 143 | CCCCGCUCCCAGGCUACCU |
| 144 | CCCGCUCCCAGGCUACCUA |
| 145 | CCGCUCCCAGGCUACCUAA |
| 146 | CGCUCCCAGGCUACCUAAG |
| 147 | GCUCCCAGGCUACCUAAGA |
| 148 | CUCCCAGGCUACCUAAGAG |
| 149 | UCCCAGGCUACCUAAGAGG |
| 150 | CCCAGGCUACCUAAGAGGA |
| 151 | CCAGGCUACCUAAGAGGAU |
| 152 | CAGGCUACCUAAGAGGAUG |
| 153 | AGGCUACCUAAGAGGAUGA |
| 154 | GGCUACCUAAGAGGAUGAG |
| 155 | GCUACCUAAGAGGAUGAGC |
| 156 | CUACCUAAGAGGAUGAGCG |
| 157 | UACCUAAGAGGAUGAGCGG |
| 158 | ACCUAAGAGGAUGAGCGGU |
| 159 | CCUAAGAGGAUGAGCGGUG |
| 160 | CUAAGAGGAUGAGCGGUGC |
| 161 | UAAGAGGAUGAGCGGUGCU |
| 162 | AAGAGGAUGAGCGGUGCUC |
| 163 | AGAGGAUGAGCGGUGCUCC |
| 164 | GAGGAUGAGCGGUGCUCCG |
| 165 | AGGAUGAGCGGUGCUCCGA |
| 166 | GGAUGAGCGGUGCUCCGAC |
| 167 | GAUGAGCGGUGCUCCGACG |
| 168 | AUGAGCGGUGCUCCGACGG |
| 169 | UGAGCGGUGCUCCGACGGC |
| 170 | GAGCGGUGCUCCGACGGCC |
| 171 | AGCGGUGCUCCGACGGCCG |
| 172 | GCGGUGCUCCGACGGCCGG |
| 173 | CGGUGCUCCGACGGCCGGG |
| 174 | GGUGCUCCGACGGCCGGGG |
| 175 | GUGCUCCGACGGCCGGGGC |
| 176 | UGCUCCGACGGCCGGGGCA |
| 177 | GCUCCGACGGCCGGGGCAG |
| 178 | CUCCGACGGCCGGGGCAGC |
| 179 | UCCGACGGCCGGGGCAGCC |
| 180 | CCGACGGCCGGGGCAGCCC |
| 181 | CGACGGCCGGGGCAGCCCU |
| 182 | GACGGCCGGGGCAGCCCUG |
| 183 | ACGGCCGGGGCAGCCCUGA |
| 184 | CGGCCGGGGCAGCCCUGAU |
| 185 | GGCCGGGGCAGCCCUGAUG |
| 186 | GCCGGGGCAGCCCUGAUGC |
| 187 | CCGGGGCAGCCCUGAUGCU |
| 188 | CGGGGCAGCCCUGAUGCUC |
| 189 | GGGGCAGCCCUGAUGCUCU |
| 190 | GGGCAGCCCUGAUGCUCUG |
| 191 | GGCAGCCCUGAUGCUCUGC |
| 192 | GCAGCCCUGAUGCUCUGCG |
| 193 | CAGCCCUGAUGCUCUGCGC |
| 194 | AGCCCUGAUGCUCUGCGCC |
| 195 | GCCCUGAUGCUCUGCGCCG |
| 196 | CCCUGAUGCUCUGCGCCGC |
| 197 | CCUGAUGCUCUGCGCCGCC |
| 198 | CUGAUGCUCUGCGCCGCCA |
| 199 | UGAUGCUCUGCGCCGCCAC |
| 200 | GAUGCUCUGCGCCGCCACC |
| 201 | AUGCUCUGCGCCGCCACCG |
| 202 | UGCUCUGCGCCGCCACCGC |
| 203 | GCUCUGCGCCGCCACCGCC |
| 204 | CUCUGCGCCGCCACCGCCG |
| 205 | UCUGCGCCGCCACCGCCGU |
| 206 | CUGCGCCGCCACCGCCGUG |
| 207 | UGCGCCGCCACCGCCGUGC |
| 208 | GCGCCGCCACCGCCGUGCU |
| 209 | CGCCGCCACCGCCGUGCUA |
| 210 | GCCGCCACCGCCGUGCUAC |
| 211 | CCGCCACCGCCGUGCUACU |
| 212 | CGCCACCGCCGUGCUACUG |
| 213 | GCCACCGCCGUGCUACUGA |
| 214 | CCACCGCCGUGCUACUGAG |
| 215 | CACCGCCGUGCUACUGAGC |
| 216 | ACCGCCGUGCUACUGAGCG |
| 217 | CCGCCGUGCUACUGAGCGC |
| 218 | CGCCGUGCUACUGAGCGCU |
| 219 | GCCGUGCUACUGAGCGCUC |
| 220 | CCGUGCUACUGAGCGCUCA |
| 221 | CGUGCUACUGAGCGCUCAG |
| 222 | GUGCUACUGAGCGCUCAGG |
| 223 | UGCUACUGAGCGCUCAGGG |
| 224 | GCUACUGAGCGCUCAGGGC |
| 225 | CUACUGAGCGCUCAGGGCG |
| 226 | UACUGAGCGCUCAGGGCGG |
| 227 | ACUGAGCGCUCAGGGCGGA |
| 228 | CUGAGCGCUCAGGGCGGAC |
| 229 | UGAGCGCUCAGGGCGGACC |
| 230 | GAGCGCUCAGGGCGGACCC |
| 231 | AGCGCUCAGGGCGGACCCG |
| 232 | GCGCUCAGGGCGGACCCGU |
| 233 | CGCUCAGGGCGGACCCGUG |
| 234 | GCUCAGGGCGGACCCGUGC |
| 235 | CUCAGGGCGGACCCGUGCA |
| 236 | UCAGGGCGGACCCGUGCAG |
| 237 | CAGGGCGGACCCGUGCAGU |
| 238 | AGGGCGGACCCGUGCAGUC |
| 239 | GGGCGGACCCGUGCAGUCC |
| 240 | GGCGGACCCGUGCAGUCCA |
| 241 | GCGGACCCGUGCAGUCCAA |
| 242 | CGGACCCGUGCAGUCCAAG |
| 243 | GGACCCGUGCAGUCCAAGU |
| 244 | GACCCGUGCAGUCCAAGUC |
| 245 | ACCCGUGCAGUCCAAGUCG |
| 246 | CCCGUGCAGUCCAAGUCGC |
| 247 | CCGUGCAGUCCAAGUCGCC |
| 248 | CGUGCAGUCCAAGUCGCCG |
| 249 | GUGCAGUCCAAGUCGCCGC |
| 250 | UGCAGUCCAAGUCGCCGCG |
| 251 | GCAGUCCAAGUCGCCGCGC |
| 252 | CAGUCCAAGUCGCCGCGCU |
| 253 | AGUCCAAGUCGCCGCGCUU |
| 254 | GUCCAAGUCGCCGCGCUUU |
| 255 | UCCAAGUCGCCGCGCUUUG |
| 256 | CCAAGUCGCCGCGCUUUGC |
| 257 | CAAGUCGCCGCGCUUUGCG |
| 258 | AAGUCGCCGCGCUUUGCGU |
| 259 | AGUCGCCGCGCUUUGCGUC |
| 260 | GUCGCCGCGCUUUGCGUCC |
| 261 | UCGCCGCGCUUUGCGUCCU |
| 262 | CGCCGCGCUUUGCGUCCUG |
| 263 | GCCGCGCUUUGCGUCCUGG |
| 264 | CCGCGCUUUGCGUCCUGGG |
| 265 | CGCGCUUUGCGUCCUGGGA |
| 266 | GCGCUUUGCGUCCUGGGAC |
| 267 | CGCUUUGCGUCCUGGGACG |
| 268 | GCUUUGCGUCCUGGGACGA |
| 269 | CUUUGCGUCCUGGGACGAG |
| 270 | UUUGCGUCCUGGGACGAGA |
| 271 | UUGCGUCCUGGGACGAGAU |
| 272 | UGCGUCCUGGGACGAGAUG |
| 273 | GCGUCCUGGGACGAGAUGA |
| 274 | CGUCCUGGGACGAGAUGAA |
| 275 | GUCCUGGGACGAGAUGAAU |
| 276 | UCCUGGGACGAGAUGAAUG |
| 277 | CCUGGGACGAGAUGAAUGU |
| 278 | CUGGGACGAGAUGAAUGUC |
| 279 | UGGGACGAGAUGAAUGUCC |
| 280 | GGGACGAGAUGAAUGUCCU |
| 281 | GGACGAGAUGAAUGUCCUG |
| 282 | GACGAGAUGAAUGUCCUGG |
| 283 | ACGAGAUGAAUGUCCUGGC |
| 284 | CGAGAUGAAUGUCCUGGCG |
| 285 | GAGAUGAAUGUCCUGGCGC |
| 286 | AGAUGAAUGUCCUGGCGCA |
| 287 | GAUGAAUGUCCUGGCGCAC |
| 288 | AUGAAUGUCCUGGCGCACG |
| 289 | UGAAUGUCCUGGCGCACGG |
| 290 | GAAUGUCCUGGCGCACGGA |
| 291 | AAUGUCCUGGCGCACGGAC |
| 292 | AUGUCCUGGCGCACGGACU |
| 293 | UGUCCUGGCGCACGGACUC |
| 294 | GUCCUGGCGCACGGACUCC |
| 295 | UCCUGGCGCACGGACUCCU |
| 296 | CCUGGCGCACGGACUCCUG |
| 297 | CUGGCGCACGGACUCCUGC |
| 298 | UGGCGCACGGACUCCUGCA |
| 299 | GGCGCACGGACUCCUGCAG |
| 300 | GCGCACGGACUCCUGCAGC |
| 301 | CGCACGGACUCCUGCAGCU |
| 302 | GCACGGACUCCUGCAGCUC |
| 303 | CACGGACUCCUGCAGCUCG |
| 304 | ACGGACUCCUGCAGCUCGG |
| 305 | CGGACUCCUGCAGCUCGGC |
| 306 | GGACUCCUGCAGCUCGGCC |
| 307 | GACUCCUGCAGCUCGGCCA |
| 308 | ACUCCUGCAGCUCGGCCAG |
| 309 | CUCCUGCAGCUCGGCCAGG |
| 310 | UCCUGCAGCUCGGCCAGGG |
| 311 | CCUGCAGCUCGGCCAGGGG |
| 312 | CUGCAGCUCGGCCAGGGGC |
| 313 | UGCAGCUCGGCCAGGGGCU |
| 314 | GCAGCUCGGCCAGGGGCUG |
| 315 | CAGCUCGGCCAGGGGCUGC |
| 316 | AGCUCGGCCAGGGGCUGCG |
| 317 | GCUCGGCCAGGGGCUGCGC |
| 318 | CUCGGCCAGGGGCUGCGCG |
| 319 | UCGGCCAGGGGCUGCGCGA |
| 320 | CGGCCAGGGGCUGCGCGAA |
| 321 | GGCCAGGGGCUGCGCGAAC |
| 322 | GCCAGGGGCUGCGCGAACA |
| 323 | CCAGGGGCUGCGCGAACAC |
| 324 | CAGGGGCUGCGCGAACACG |
| 325 | AGGGGCUGCGCGAACACGC |
| 326 | GGGGCUGCGCGAACACGCG |
| 327 | GGGCUGCGCGAACACGCGG |
| 328 | GGCUGCGCGAACACGCGGA |
| 329 | GCUGCGCGAACACGCGGAG |
| 330 | CUGCGCGAACACGCGGAGC |
| 331 | UGCGCGAACACGCGGAGCG |
| 332 | GCGCGAACACGCGGAGCGC |
| 333 | CGCGAACACGCGGAGCGCA |
| 334 | GCGAACACGCGGAGCGCAC |
| 335 | CGAACACGCGGAGCGCACC |
| 336 | GAACACGCGGAGCGCACCC |
| 337 | AACACGCGGAGCGCACCCG |
| 338 | ACACGCGGAGCGCACCCGC |
| 339 | CACGCGGAGCGCACCCGCA |
| 340 | ACGCGGAGCGCACCCGCAG |
| 341 | CGCGGAGCGCACCCGCAGU |
| 342 | GCGGAGCGCACCCGCAGUC |
| 343 | CGGAGCGCACCCGCAGUCA |
| 344 | GGAGCGCACCCGCAGUCAG |
| 345 | GAGCGCACCCGCAGUCAGC |
| 346 | AGCGCACCCGCAGUCAGCU |
| 347 | GCGCACCCGCAGUCAGCUG |
| 348 | CGCACCCGCAGUCAGCUGA |
| 349 | GCACCCGCAGUCAGCUGAG |
| 350 | CACCCGCAGUCAGCUGAGC |
| 351 | ACCCGCAGUCAGCUGAGCG |
| 352 | CCCGCAGUCAGCUGAGCGC |
| 353 | CCGCAGUCAGCUGAGCGCG |
| 354 | CGCAGUCAGCUGAGCGCGC |
| 355 | GCAGUCAGCUGAGCGCGCU |
| 356 | CAGUCAGCUGAGCGCGCUG |
| 357 | AGUCAGCUGAGCGCGCUGG |
| 358 | GUCAGCUGAGCGCGCUGGA |
| 359 | UCAGCUGAGCGCGCUGGAG |
| 360 | CAGCUGAGCGCGCUGGAGC |
| 361 | AGCUGAGCGCGCUGGAGCG |
| 362 | GCUGAGCGCGCUGGAGCGG |
| 363 | CUGAGCGCGCUGGAGCGGC |
| 364 | UGAGCGCGCUGGAGCGGCG |
| 365 | GAGCGCGCUGGAGCGGCGC |
| 366 | AGCGCGCUGGAGCGGCGCC |
| 367 | GCGCGCUGGAGCGGCGCCU |
| 368 | CGCGCUGGAGCGGCGCCUG |
| 369 | GCGCUGGAGCGGCGCCUGA |
| 370 | CGCUGGAGCGGCGCCUGAG |
| 371 | GCUGGAGCGGCGCCUGAGC |
| 372 | CUGGAGCGGCGCCUGAGCG |
| 373 | UGGAGCGGCGCCUGAGCGC |
| 374 | GGAGCGGCGCCUGAGCGCG |
| 375 | GAGCGGCGCCUGAGCGCGU |
| 376 | AGCGGCGCCUGAGCGCGUG |
| 377 | GCGGCGCCUGAGCGCGUGC |
| 378 | CGGCGCCUGAGCGCGUGCG |
| 379 | GGCGCCUGAGCGCGUGCGG |
| 380 | GCGCCUGAGCGCGUGCGGG |
| 381 | CGCCUGAGCGCGUGCGGGU |
| 382 | GCCUGAGCGCGUGCGGGUC |
| 383 | CCUGAGCGCGUGCGGGUCC |
| 384 | CUGAGCGCGUGCGGGUCCG |
| 385 | UGAGCGCGUGCGGGUCCGC |
| 386 | GAGCGCGUGCGGGUCCGCC |
| 387 | AGCGCGUGCGGGUCCGCCU |
| 388 | GCGCGUGCGGGUCCGCCUG |
| 389 | CGCGUGCGGGUCCGCCUGU |
| 390 | GCGUGCGGGUCCGCCUGUC |
| 391 | CGUGCGGGUCCGCCUGUCA |
| 392 | GUGCGGGUCCGCCUGUCAG |
| 393 | UGCGGGUCCGCCUGUCAGG |
| 394 | GCGGGUCCGCCUGUCAGGG |
| 395 | CGGGUCCGCCUGUCAGGGA |
| 396 | GGGUCCGCCUGUCAGGGAA |
| 397 | GGUCCGCCUGUCAGGGAAC |
| 398 | GUCCGCCUGUCAGGGAACC |
| 399 | UCCGCCUGUCAGGGAACCG |
| 400 | CCGCCUGUCAGGGAACCGA |
| 401 | CGCCUGUCAGGGAACCGAG |
| 402 | GCCUGUCAGGGAACCGAGG |
| 403 | CCUGUCAGGGAACCGAGGG |
| 404 | CUGUCAGGGAACCGAGGGG |
| 405 | UGUCAGGGAACCGAGGGGU |
| 406 | GUCAGGGAACCGAGGGGUC |
| 407 | UCAGGGAACCGAGGGGUCC |
| 408 | CAGGGAACCGAGGGGUCCA |
| 409 | AGGGAACCGAGGGGUCCAC |
| 410 | GGGAACCGAGGGGUCCACC |
| 411 | GGAACCGAGGGGUCCACCG |
| 412 | GAACCGAGGGGUCCACCGA |
| 413 | AACCGAGGGGUCCACCGAC |
| 414 | ACCGAGGGGUCCACCGACC |
| 415 | CCGAGGGGUCCACCGACCU |
| 416 | CGAGGGGUCCACCGACCUC |
| 417 | GAGGGGUCCACCGACCUCC |
| 418 | AGGGGUCCACCGACCUCCC |
| 419 | GGGGUCCACCGACCUCCCG |
| 420 | GGGUCCACCGACCUCCCGU |
| 421 | GGUCCACCGACCUCCCGUU |
| 422 | GUCCACCGACCUCCCGUUA |
| 423 | UCCACCGACCUCCCGUUAG |
| 424 | CCACCGACCUCCCGUUAGC |
| 425 | CACCGACCUCCCGUUAGCC |
| 426 | ACCGACCUCCCGUUAGCCC |
| 427 | CCGACCUCCCGUUAGCCCC |
| 428 | CGACCUCCCGUUAGCCCCU |
| 429 | GACCUCCCGUUAGCCCCUG |
| 430 | ACCUCCCGUUAGCCCCUGA |
| 431 | CCUCCCGUUAGCCCCUGAG |
| 432 | CUCCCGUUAGCCCCUGAGA |
| 433 | UCCCGUUAGCCCCUGAGAG |
| 434 | CCCGUUAGCCCCUGAGAGC |
| 435 | CCGUUAGCCCCUGAGAGCC |
| 436 | CGUUAGCCCCUGAGAGCCG |
| 437 | GUUAGCCCCUGAGAGCCGG |
| 438 | UUAGCCCCUGAGAGCCGGG |
| 439 | UAGCCCCUGAGAGCCGGGU |
| 440 | AGCCCCUGAGAGCCGGGUG |
| 441 | GCCCCUGAGAGCCGGGUGG |
| 442 | CCCCUGAGAGCCGGGUGGA |
| 443 | CCCUGAGAGCCGGGUGGAC |
| 444 | CCUGAGAGCCGGGUGGACC |
| 445 | CUGAGAGCCGGGUGGACCC |
| 446 | UGAGAGCCGGGUGGACCCU |
| 447 | GAGAGCCGGGUGGACCCUG |
| 448 | AGAGCCGGGUGGACCCUGA |
| 449 | GAGCCGGGUGGACCCUGAG |
| 450 | AGCCGGGUGGACCCUGAGG |
| 451 | GCCGGGUGGACCCUGAGGU |
| 452 | CCGGGUGGACCCUGAGGUC |
| 453 | CGGGUGGACCCUGAGGUCC |
| 454 | GGGUGGACCCUGAGGUCCU |
| 455 | GGUGGACCCUGAGGUCCUU |
| 456 | GUGGACCCUGAGGUCCUUC |
| 457 | UGGACCCUGAGGUCCUUCA |
| 458 | GGACCCUGAGGUCCUUCAC |
| 459 | GACCCUGAGGUCCUUCACA |
| 460 | ACCCUGAGGUCCUUCACAG |
| 461 | CCCUGAGGUCCUUCACAGC |
| 462 | CCUGAGGUCCUUCACAGCC |
| 463 | CUGAGGUCCUUCACAGCCU |
| 464 | UGAGGUCCUUCACAGCCUG |
| 465 | GAGGUCCUUCACAGCCUGC |
| 466 | AGGUCCUUCACAGCCUGCA |
| 467 | GGUCCUUCACAGCCUGCAG |
| 468 | GUCCUUCACAGCCUGCAGA |
| 469 | UCCUUCACAGCCUGCAGAC |
| 470 | CCUUCACAGCCUGCAGACA |
| 471 | CUUCACAGCCUGCAGACAC |
| 472 | UUCACAGCCUGCAGACACA |
| 473 | UCACAGCCUGCAGACACAA |
| 474 | CACAGCCUGCAGACACAAC |
| 475 | ACAGCCUGCAGACACAACU |
| 476 | CAGCCUGCAGACACAACUC |
| 477 | AGCCUGCAGACACAACUCA |
| 478 | GCCUGCAGACACAACUCAA |
| 479 | CCUGCAGACACAACUCAAG |
| 480 | CUGCAGACACAACUCAAGG |
| 481 | UGCAGACACAACUCAAGGC |
| 482 | GCAGACACAACUCAAGGCU |
| 483 | CAGACACAACUCAAGGCUC |
| 484 | AGACACAACUCAAGGCUCA |
| 485 | GACACAACUCAAGGCUCAG |
| 486 | ACACAACUCAAGGCUCAGA |
| 487 | CACAACUCAAGGCUCAGAA |
| 488 | ACAACUCAAGGCUCAGAAC |
| 489 | CAACUCAAGGCUCAGAACA |
| 490 | AACUCAAGGCUCAGAACAG |
| 491 | ACUCAAGGCUCAGAACAGC |
| 492 | CUCAAGGCUCAGAACAGCA |
| 493 | UCAAGGCUCAGAACAGCAG |
| 494 | CAAGGCUCAGAACAGCAGG |
| 495 | AAGGCUCAGAACAGCAGGA |
| 496 | AGGCUCAGAACAGCAGGAU |
| 497 | GGCUCAGAACAGCAGGAUC |
| 498 | GCUCAGAACAGCAGGAUCC |
| 499 | CUCAGAACAGCAGGAUCCA |
| 500 | UCAGAACAGCAGGAUCCAG |
| 501 | CAGAACAGCAGGAUCCAGC |
| 502 | AGAACAGCAGGAUCCAGCA |
| 503 | GAACAGCAGGAUCCAGCAA |
| 504 | AACAGCAGGAUCCAGCAAC |
| 505 | ACAGCAGGAUCCAGCAACU |
| 506 | CAGCAGGAUCCAGCAACUC |
| 507 | AGCAGGAUCCAGCAACUCU |
| 508 | GCAGGAUCCAGCAACUCUU |
| 509 | CAGGAUCCAGCAACUCUUC |
| 510 | AGGAUCCAGCAACUCUUCC |
| 511 | GGAUCCAGCAACUCUUCCA |
| 512 | GAUCCAGCAACUCUUCCAC |
| 513 | AUCCAGCAACUCUUCCACA |
| 514 | UCCAGCAACUCUUCCACAA |
| 515 | CCAGCAACUCUUCCACAAG |
| 516 | CAGCAACUCUUCCACAAGG |
| 517 | AGCAACUCUUCCACAAGGU |
| 518 | GCAACUCUUCCACAAGGUG |
| 519 | CAACUCUUCCACAAGGUGG |
| 520 | AACUCUUCCACAAGGUGGC |
| 521 | ACUCUUCCACAAGGUGGCC |
| 522 | CUCUUCCACAAGGUGGCCC |
| 523 | UCUUCCACAAGGUGGCCCA |
| 524 | CUUCCACAAGGUGGCCCAG |
| 525 | UUCCACAAGGUGGCCCAGC |
| 526 | UCCACAAGGUGGCCCAGCA |
| 527 | CCACAAGGUGGCCCAGCAG |
| 528 | CACAAGGUGGCCCAGCAGC |
| 529 | ACAAGGUGGCCCAGCAGCA |
| 530 | CAAGGUGGCCCAGCAGCAG |
| 531 | AAGGUGGCCCAGCAGCAGC |
| 532 | AGGUGGCCCAGCAGCAGCG |
| 533 | GGUGGCCCAGCAGCAGCGG |
| 534 | GUGGCCCAGCAGCAGCGGC |
| 535 | UGGCCCAGCAGCAGCGGCA |
| 536 | GGCCCAGCAGCAGCGGCAC |
| 537 | GCCCAGCAGCAGCGGCACC |
| 538 | CCCAGCAGCAGCGGCACCU |
| 539 | CCAGCAGCAGCGGCACCUG |
| 540 | CAGCAGCAGCGGCACCUGG |
| 541 | AGCAGCAGCGGCACCUGGA |
| 542 | GCAGCAGCGGCACCUGGAG |
| 543 | CAGCAGCGGCACCUGGAGA |
| 544 | AGCAGCGGCACCUGGAGAA |
| 545 | GCAGCGGCACCUGGAGAAG |
| 546 | CAGCGGCACCUGGAGAAGC |
| 547 | AGCGGCACCUGGAGAAGCA |
| 548 | GCGGCACCUGGAGAAGCAG |
| 549 | CGGCACCUGGAGAAGCAGC |
| 550 | GGCACCUGGAGAAGCAGCA |
| 551 | GCACCUGGAGAAGCAGCAC |
| 552 | CACCUGGAGAAGCAGCACC |
| 553 | ACCUGGAGAAGCAGCACCU |
| 554 | CCUGGAGAAGCAGCACCUG |
| 555 | CUGGAGAAGCAGCACCUGC |
| 556 | UGGAGAAGCAGCACCUGCG |
| 557 | GGAGAAGCAGCACCUGCGA |
| 558 | GAGAAGCAGCACCUGCGAA |
| 559 | AGAAGCAGCACCUGCGAAU |
| 560 | GAAGCAGCACCUGCGAAUU |
| 561 | AAGCAGCACCUGCGAAUUC |
| 562 | AGCAGCACCUGCGAAUUCA |
| 563 | GCAGCACCUGCGAAUUCAG |
| 564 | CAGCACCUGCGAAUUCAGC |
| 565 | AGCACCUGCGAAUUCAGCA |
| 566 | GCACCUGCGAAUUCAGCAU |
| 567 | CACCUGCGAAUUCAGCAUC |
| 568 | ACCUGCGAAUUCAGCAUCU |
| 569 | CCUGCGAAUUCAGCAUCUG |
| 570 | CUGCGAAUUCAGCAUCUGC |
| 571 | UGCGAAUUCAGCAUCUGCA |
| 572 | GCGAAUUCAGCAUCUGCAA |
| 573 | CGAAUUCAGCAUCUGCAAA |
| 574 | GAAUUCAGCAUCUGCAAAG |
| 575 | AAUUCAGCAUCUGCAAAGC |
| 576 | AUUCAGCAUCUGCAAAGCC |
| 577 | UUCAGCAUCUGCAAAGCCA |
| 578 | UCAGCAUCUGCAAAGCCAG |
| 579 | CAGCAUCUGCAAAGCCAGU |
| 580 | AGCAUCUGCAAAGCCAGUU |
| 581 | GCAUCUGCAAAGCCAGUUU |
| 582 | CAUCUGCAAAGCCAGUUUG |
| 583 | AUCUGCAAAGCCAGUUUGG |
| 584 | UCUGCAAAGCCAGUUUGGC |
| 585 | CUGCAAAGCCAGUUUGGCC |
| 586 | UGCAAAGCCAGUUUGGCCU |
| 587 | GCAAAGCCAGUUUGGCCUC |
| 588 | CAAAGCCAGUUUGGCCUCC |
| 589 | AAAGCCAGUUUGGCCUCCU |
| 590 | AAGCCAGUUUGGCCUCCUG |
| 591 | AGCCAGUUUGGCCUCCUGG |
| 592 | GCCAGUUUGGCCUCCUGGA |
| 593 | CCAGUUUGGCCUCCUGGAC |
| 594 | CAGUUUGGCCUCCUGGACC |
| 595 | AGUUUGGCCUCCUGGACCA |
| 596 | GUUUGGCCUCCUGGACCAC |
| 597 | UUUGGCCUCCUGGACCACA |
| 598 | UUGGCCUCCUGGACCACAA |
| 599 | UGGCCUCCUGGACCACAAG |
| 600 | GGCCUCCUGGACCACAAGC |
| 601 | GCCUCCUGGACCACAAGCA |
| 602 | CCUCCUGGACCACAAGCAC |
| 603 | CUCCUGGACCACAAGCACC |
| 604 | UCCUGGACCACAAGCACCU |
| 605 | CCUGGACCACAAGCACCUA |
| 606 | CUGGACCACAAGCACCUAG |
| 607 | UGGACCACAAGCACCUAGA |
| 608 | GGACCACAAGCACCUAGAC |
| 609 | GACCACAAGCACCUAGACC |
| 610 | ACCACAAGCACCUAGACCA |
| 611 | CCACAAGCACCUAGACCAU |
| 612 | CACAAGCACCUAGACCAUG |
| 613 | ACAAGCACCUAGACCAUGA |
| 614 | CAAGCACCUAGACCAUGAG |
| 615 | AAGCACCUAGACCAUGAGG |
| 616 | AGCACCUAGACCAUGAGGU |
| 617 | GCACCUAGACCAUGAGGUG |
| 618 | CACCUAGACCAUGAGGUGG |
| 619 | ACCUAGACCAUGAGGUGGC |
| 620 | CCUAGACCAUGAGGUGGCC |
| 621 | CUAGACCAUGAGGUGGCCA |
| 622 | UAGACCAUGAGGUGGCCAA |
| 623 | AGACCAUGAGGUGGCCAAG |
| 624 | GACCAUGAGGUGGCCAAGC |
| 625 | ACCAUGAGGUGGCCAAGCC |
| 626 | CCAUGAGGUGGCCAAGCCU |
| 627 | CAUGAGGUGGCCAAGCCUG |
| 628 | AUGAGGUGGCCAAGCCUGC |
| 629 | UGAGGUGGCCAAGCCUGCC |
| 630 | GAGGUGGCCAAGCCUGCCC |
| 631 | AGGUGGCCAAGCCUGCCCG |
| 632 | GGUGGCCAAGCCUGCCCGA |
| 633 | GUGGCCAAGCCUGCCCGAA |
| 634 | UGGCCAAGCCUGCCCGAAG |
| 635 | GGCCAAGCCUGCCCGAAGA |
| 636 | GCCAAGCCUGCCCGAAGAA |
| 637 | CCAAGCCUGCCCGAAGAAA |
| 638 | CAAGCCUGCCCGAAGAAAG |
| 639 | AAGCCUGCCCGAAGAAAGA |
| 640 | AGCCUGCCCGAAGAAAGAG |
| 641 | GCCUGCCCGAAGAAAGAGG |
| 642 | CCUGCCCGAAGAAAGAGGC |
| 643 | CUGCCCGAAGAAAGAGGCU |
| 644 | UGCCCGAAGAAAGAGGCUG |
| 645 | GCCCGAAGAAAGAGGCUGC |
| 646 | CCCGAAGAAAGAGGCUGCC |
| 647 | CCGAAGAAAGAGGCUGCCC |
| 648 | CGAAGAAAGAGGCUGCCCG |
| 649 | GAAGAAAGAGGCUGCCCGA |
| 650 | AAGAAAGAGGCUGCCCGAG |
| 651 | AGAAAGAGGCUGCCCGAGA |
| 652 | GAAAGAGGCUGCCCGAGAU |
| 653 | AAAGAGGCUGCCCGAGAUG |
| 654 | AAGAGGCUGCCCGAGAUGG |
| 655 | AGAGGCUGCCCGAGAUGGC |
| 656 | GAGGCUGCCCGAGAUGGCC |
| 657 | AGGCUGCCCGAGAUGGCCC |
| 658 | GGCUGCCCGAGAUGGCCCA |
| 659 | GCUGCCCGAGAUGGCCCAG |
| 660 | CUGCCCGAGAUGGCCCAGC |
| 661 | UGCCCGAGAUGGCCCAGCC |
| 662 | GCCCGAGAUGGCCCAGCCA |
| 663 | CCCGAGAUGGCCCAGCCAG |
| 664 | CCGAGAUGGCCCAGCCAGU |
| 665 | CGAGAUGGCCCAGCCAGUU |
| 666 | GAGAUGGCCCAGCCAGUUG |
| 667 | AGAUGGCCCAGCCAGUUGA |
| 668 | GAUGGCCCAGCCAGUUGAC |
| 669 | AUGGCCCAGCCAGUUGACC |
| 670 | UGGCCCAGCCAGUUGACCC |
| 671 | GGCCCAGCCAGUUGACCCG |
| 672 | GCCCAGCCAGUUGACCCGG |
| 673 | CCCAGCCAGUUGACCCGGC |
| 674 | CCAGCCAGUUGACCCGGCU |
| 675 | CAGCCAGUUGACCCGGCUC |
| 676 | AGCCAGUUGACCCGGCUCA |
| 677 | GCCAGUUGACCCGGCUCAC |
| 678 | CCAGUUGACCCGGCUCACA |
| 679 | CAGUUGACCCGGCUCACAA |
| 680 | AGUUGACCCGGCUCACAAU |
| 681 | GUUGACCCGGCUCACAAUG |
| 682 | UUGACCCGGCUCACAAUGU |
| 683 | UGACCCGGCUCACAAUGUC |
| 684 | GACCCGGCUCACAAUGUCA |
| 685 | ACCCGGCUCACAAUGUCAG |
| 686 | CCCGGCUCACAAUGUCAGC |
| 687 | CCGGCUCACAAUGUCAGCC |
| 688 | CGGCUCACAAUGUCAGCCG |
| 689 | GGCUCACAAUGUCAGCCGC |
| 690 | GCUCACAAUGUCAGCCGCC |
| 691 | CUCACAAUGUCAGCCGCCU |
| 692 | UCACAAUGUCAGCCGCCUG |
| 693 | CACAAUGUCAGCCGCCUGC |
| 694 | ACAAUGUCAGCCGCCUGCA |
| 695 | CAAUGUCAGCCGCCUGCAC |
| 696 | AAUGUCAGCCGCCUGCACC |
| 697 | AUGUCAGCCGCCUGCACCG |
| 698 | UGUCAGCCGCCUGCACCGG |
| 699 | GUCAGCCGCCUGCACCGGC |
| 700 | UCAGCCGCCUGCACCGGCU |
| 701 | CAGCCGCCUGCACCGGCUG |
| 702 | AGCCGCCUGCACCGGCUGC |
| 703 | GCCGCCUGCACCGGCUGCC |
| 704 | CCGCCUGCACCGGCUGCCC |
| 705 | CGCCUGCACCGGCUGCCCA |
| 706 | GCCUGCACCGGCUGCCCAG |
| 707 | CCUGCACCGGCUGCCCAGG |
| 708 | CUGCACCGGCUGCCCAGGG |
| 709 | UGCACCGGCUGCCCAGGGA |
| 710 | GCACCGGCUGCCCAGGGAU |
| 711 | CACCGGCUGCCCAGGGAUU |
| 712 | ACCGGCUGCCCAGGGAUUG |
| 713 | CCGGCUGCCCAGGGAUUGC |
| 714 | CGGCUGCCCAGGGAUUGCC |
| 715 | GGCUGCCCAGGGAUUGCCA |
| 716 | GCUGCCCAGGGAUUGCCAG |
| 717 | CUGCCCAGGGAUUGCCAGG |
| 718 | UGCCCAGGGAUUGCCAGGA |
| 719 | GCCCAGGGAUUGCCAGGAG |
| 720 | CCCAGGGAUUGCCAGGAGC |
| 721 | CCAGGGAUUGCCAGGAGCU |
| 722 | CAGGGAUUGCCAGGAGCUG |
| 723 | AGGGAUUGCCAGGAGCUGU |
| 724 | GGGAUUGCCAGGAGCUGUU |
| 725 | GGAUUGCCAGGAGCUGUUC |
| 726 | GAUUGCCAGGAGCUGUUCC |
| 727 | AUUGCCAGGAGCUGUUCCA |
| 728 | UUGCCAGGAGCUGUUCCAG |
| 729 | UGCCAGGAGCUGUUCCAGG |
| 730 | GCCAGGAGCUGUUCCAGGU |
| 731 | CCAGGAGCUGUUCCAGGUU |
| 732 | CAGGAGCUGUUCCAGGUUG |
| 733 | AGGAGCUGUUCCAGGUUGG |
| 734 | GGAGCUGUUCCAGGUUGGG |
| 735 | GAGCUGUUCCAGGUUGGGG |
| 736 | AGCUGUUCCAGGUUGGGGA |
| 737 | GCUGUUCCAGGUUGGGGAG |
| 738 | CUGUUCCAGGUUGGGGAGA |
| 739 | UGUUCCAGGUUGGGGAGAG |
| 740 | GUUCCAGGUUGGGGAGAGG |
| 741 | UUCCAGGUUGGGGAGAGGC |
| 742 | UCCAGGUUGGGGAGAGGCA |
| 743 | CCAGGUUGGGGAGAGGCAG |
| 744 | CAGGUUGGGGAGAGGCAGA |
| 745 | AGGUUGGGGAGAGGCAGAG |
| 746 | GGUUGGGGAGAGGCAGAGU |
| 747 | GUUGGGGAGAGGCAGAGUG |
| 748 | UUGGGGAGAGGCAGAGUGG |
| 749 | UGGGGAGAGGCAGAGUGGA |
| 750 | GGGGAGAGGCAGAGUGGAC |
| 751 | GGGAGAGGCAGAGUGGACU |
| 752 | GGAGAGGCAGAGUGGACUA |
| 753 | GAGAGGCAGAGUGGACUAU |
| 754 | AGAGGCAGAGUGGACUAUU |
| 755 | GAGGCAGAGUGGACUAUUU |
| 756 | AGGCAGAGUGGACUAUUUG |
| 757 | GGCAGAGUGGACUAUUUGA |
| 758 | GCAGAGUGGACUAUUUGAA |
| 759 | CAGAGUGGACUAUUUGAAA |
| 760 | AGAGUGGACUAUUUGAAAU |
| 761 | GAGUGGACUAUUUGAAAUC |
| 762 | AGUGGACUAUUUGAAAUCC |
| 763 | GUGGACUAUUUGAAAUCCA |
| 764 | UGGACUAUUUGAAAUCCAG |
| 765 | GGACUAUUUGAAAUCCAGC |
| 766 | GACUAUUUGAAAUCCAGCC |
| 767 | ACUAUUUGAAAUCCAGCCU |
| 768 | CUAUUUGAAAUCCAGCCUC |
| 769 | UAUUUGAAAUCCAGCCUCA |
| 770 | AUUUGAAAUCCAGCCUCAG |
| 771 | UUUGAAAUCCAGCCUCAGG |
| 772 | UUGAAAUCCAGCCUCAGGG |
| 773 | UGAAAUCCAGCCUCAGGGG |
| 774 | GAAAUCCAGCCUCAGGGGU |
| 775 | AAAUCCAGCCUCAGGGGUC |
| 776 | AAUCCAGCCUCAGGGGUCU |
| 777 | AUCCAGCCUCAGGGGUCUC |
| 778 | UCCAGCCUCAGGGGUCUCC |
| 779 | CCAGCCUCAGGGGUCUCCG |
| 780 | CAGCCUCAGGGGUCUCCGC |
| 781 | AGCCUCAGGGGUCUCCGCC |
| 782 | GCCUCAGGGGUCUCCGCCA |
| 783 | CCUCAGGGGUCUCCGCCAU |
| 784 | CUCAGGGGUCUCCGCCAUU |
| 785 | UCAGGGGUCUCCGCCAUUU |
| 786 | CAGGGGUCUCCGCCAUUUU |
| 787 | AGGGGUCUCCGCCAUUUUU |
| 788 | GGGGUCUCCGCCAUUUUUG |
| 789 | GGGUCUCCGCCAUUUUUGG |
| 790 | GGUCUCCGCCAUUUUUGGU |
| 791 | GUCUCCGCCAUUUUUGGUG |
| 792 | UCUCCGCCAUUUUUGGUGA |
| 793 | CUCCGCCAUUUUUGGUGAA |
| 794 | UCCGCCAUUUUUGGUGAAC |
| 795 | CCGCCAUUUUUGGUGAACU |
| 796 | CGCCAUUUUUGGUGAACUG |
| 797 | GCCAUUUUUGGUGAACUGC |
| 798 | CCAUUUUUGGUGAACUGCA |
| 799 | CAUUUUUGGUGAACUGCAA |
| 800 | AUUUUUGGUGAACUGCAAG |
| 801 | UUUUUGGUGAACUGCAAGA |
| 802 | UUUUGGUGAACUGCAAGAU |
| 803 | UUUGGUGAACUGCAAGAUG |
| 804 | UUGGUGAACUGCAAGAUGA |
| 805 | UGGUGAACUGCAAGAUGAC |
| 806 | GGUGAACUGCAAGAUGACC |
| 807 | GUGAACUGCAAGAUGACCU |
| 808 | UGAACUGCAAGAUGACCUC |
| 809 | GAACUGCAAGAUGACCUCA |
| 810 | AACUGCAAGAUGACCUCAG |
| 811 | ACUGCAAGAUGACCUCAGA |
| 812 | CUGCAAGAUGACCUCAGAU |
| 813 | UGCAAGAUGACCUCAGAUG |
| 814 | GCAAGAUGACCUCAGAUGG |
| 815 | CAAGAUGACCUCAGAUGGA |
| 816 | AAGAUGACCUCAGAUGGAG |
| 817 | AGAUGACCUCAGAUGGAGG |
| 818 | GAUGACCUCAGAUGGAGGC |
| 819 | AUGACCUCAGAUGGAGGCU |
| 820 | UGACCUCAGAUGGAGGCUG |
| 821 | GACCUCAGAUGGAGGCUGG |
| 822 | ACCUCAGAUGGAGGCUGGA |
| 823 | CCUCAGAUGGAGGCUGGAC |
| 824 | CUCAGAUGGAGGCUGGACA |
| 825 | UCAGAUGGAGGCUGGACAG |
| 826 | CAGAUGGAGGCUGGACAGU |
| 827 | AGAUGGAGGCUGGACAGUA |
| 828 | GAUGGAGGCUGGACAGUAA |
| 829 | AUGGAGGCUGGACAGUAAU |
| 830 | UGGAGGCUGGACAGUAAUU |
| 831 | GGAGGCUGGACAGUAAUUC |
| 832 | GAGGCUGGACAGUAAUUCA |
| 833 | AGGCUGGACAGUAAUUCAG |
| 834 | GGCUGGACAGUAAUUCAGA |
| 835 | GCUGGACAGUAAUUCAGAG |
| 836 | CUGGACAGUAAUUCAGAGG |
| 837 | UGGACAGUAAUUCAGAGGC |
| 838 | GGACAGUAAUUCAGAGGCG |
| 839 | GACAGUAAUUCAGAGGCGC |
| 840 | ACAGUAAUUCAGAGGCGCC |
| 841 | CAGUAAUUCAGAGGCGCCA |
| 842 | AGUAAUUCAGAGGCGCCAC |
| 843 | GUAAUUCAGAGGCGCCACG |
| 844 | UAAUUCAGAGGCGCCACGA |
| 845 | AAUUCAGAGGCGCCACGAU |
| 846 | AUUCAGAGGCGCCACGAUG |
| 847 | UUCAGAGGCGCCACGAUGG |
| 848 | UCAGAGGCGCCACGAUGGC |
| 849 | CAGAGGCGCCACGAUGGCU |
| 850 | AGAGGCGCCACGAUGGCUC |
| 851 | GAGGCGCCACGAUGGCUCA |
| 852 | AGGCGCCACGAUGGCUCAG |
| 853 | GGCGCCACGAUGGCUCAGU |
| 854 | GCGCCACGAUGGCUCAGUG |
| 855 | CGCCACGAUGGCUCAGUGG |
| 856 | GCCACGAUGGCUCAGUGGA |
| 857 | CCACGAUGGCUCAGUGGAC |
| 858 | CACGAUGGCUCAGUGGACU |
| 859 | ACGAUGGCUCAGUGGACUU |
| 860 | CGAUGGCUCAGUGGACUUC |
| 861 | GAUGGCUCAGUGGACUUCA |
| 862 | AUGGCUCAGUGGACUUCAA |
| 863 | UGGCUCAGUGGACUUCAAC |
| 864 | GGCUCAGUGGACUUCAACC |
| 865 | GCUCAGUGGACUUCAACCG |
| 866 | CUCAGUGGACUUCAACCGG |
| 867 | UCAGUGGACUUCAACCGGC |
| 868 | CAGUGGACUUCAACCGGCC |
| 869 | AGUGGACUUCAACCGGCCC |
| 870 | GUGGACUUCAACCGGCCCU |
| 871 | UGGACUUCAACCGGCCCUG |
| 872 | GGACUUCAACCGGCCCUGG |
| 873 | GACUUCAACCGGCCCUGGG |
| 874 | ACUUCAACCGGCCCUGGGA |
| 875 | CUUCAACCGGCCCUGGGAA |
| 876 | UUCAACCGGCCCUGGGAAG |
| 877 | UCAACCGGCCCUGGGAAGC |
| 878 | CAACCGGCCCUGGGAAGCC |
| 879 | AACCGGCCCUGGGAAGCCU |
| 880 | ACCGGCCCUGGGAAGCCUA |
| 881 | CCGGCCCUGGGAAGCCUAC |
| 882 | CGGCCCUGGGAAGCCUACA |
| 883 | GGCCCUGGGAAGCCUACAA |
| 884 | GCCCUGGGAAGCCUACAAG |
| 885 | CCCUGGGAAGCCUACAAGG |
| 886 | CCUGGGAAGCCUACAAGGC |
| 887 | CUGGGAAGCCUACAAGGCG |
| 888 | UGGGAAGCCUACAAGGCGG |
| 889 | GGGAAGCCUACAAGGCGGG |
| 890 | GGAAGCCUACAAGGCGGGG |
| 891 | GAAGCCUACAAGGCGGGGU |
| 892 | AAGCCUACAAGGCGGGGUU |
| 893 | AGCCUACAAGGCGGGGUUU |
| 894 | GCCUACAAGGCGGGGUUUG |
| 895 | CCUACAAGGCGGGGUUUGG |
| 896 | CUACAAGGGGGGUUUGGG |
| 897 | UACAAGGCGGGGUUUGGGG |
| 898 | ACAAGGCGGGGUUUGGGGA |
| 899 | CAAGGCGGGGUUUGGGGAU |
| 900 | AAGGCGGGGUUUGGGGAUC |
| 901 | AGGCGGGGUUUGGGGAUCC |
| 902 | GGCGGGGUUUGGGGAUCCC |
| 903 | GCGGGGUUUGGGGAUCCCC |
| 904 | CGGGGUUUGGGGAUCCCCA |
| 905 | GGGGUUUGGGGAUCCCCAC |
| 906 | GGGUUUGGGGAUCCCCACG |
| 907 | GGUUUGGGGAUCCCCACGG |
| 908 | GUUUGGGGAUCCCCACGGC |
| 909 | UUUGGGGAUCCCCACGGCG |
| 910 | UUGGGGAUCCCCACGGCGA |
| 911 | UGGGGAUCCCCACGGCGAG |
| 912 | GGGGAUCCCCACGGCGAGU |
| 913 | GGGAUCCCCACGGCGAGUU |
| 914 | GGAUCCCCACGGCGAGUUC |
| 915 | GAUCCCCACGGCGAGUUCU |
| 916 | AUCCCCACGGCGAGUUCUG |
| 917 | UCCCCACGGCGAGUUCUGG |
| 918 | CCCCACGGCGAGUUCUGGC |
| 919 | CCCACGGCGAGUUCUGGCU |
| 920 | CCACGGCGAGUUCUGGCUG |
| 921 | CACGGCGAGUUCUGGCUGG |
| 922 | ACGGCGAGUUCUGGCUGGG |
| 923 | CGGCGAGUUCUGGCUGGGU |
| 924 | GGCGAGUUCUGGCUGGGUC |
| 925 | GCGAGUUCUGGCUGGGUCU |
| 926 | CGAGUUCUGGCUGGGUCUG |
| 927 | GAGUUCUGGCUGGGUCUGG |
| 928 | AGUUCUGGCUGGGUCUGGA |
| 929 | GUUCUGGCUGGGUCUGGAG |
| 930 | UUCUGGCUGGGUCUGGAGA |
| 931 | UCUGGCUGGGUCUGGAGAA |
| 932 | CUGGCUGGGUCUGGAGAAG |
| 933 | UGGCUGGGUCUGGAGAAGG |
| 934 | GGCUGGGUCUGGAGAAGGU |
| 935 | GCUGGGUCUGGAGAAGGUG |
| 936 | CUGGGUCUGGAGAAGGUGC |
| 937 | UGGGUCUGGAGAAGGUGCA |
| 938 | GGGUCUGGAGAAGGUGCAU |
| 939 | GGUCUGGAGAAGGUGCAUA |
| 940 | GUCUGGAGAAGGUGCAUAG |
| 941 | UCUGGAGAAGGUGCAUAGC |
| 942 | CUGGAGAAGGUGCAUAGCA |
| 943 | UGGAGAAGGUGCAUAGCAU |
| 944 | GGAGAAGGUGCAUAGCAUC |
| 945 | GAGAAGGUGCAUAGCAUCA |
| 946 | AGAAGGUGCAUAGCAUCAC |
| 947 | GAAGGUGCAUAGCAUCACG |
| 948 | AAGGUGCAUAGCAUCACGG |
| 949 | AGGUGCAUAGCAUCACGGG |
| 950 | GGUGCAUAGCAUCACGGGG |
| 951 | GUGCAUAGCAUCACGGGGG |
| 952 | UGCAUAGCAUCACGGGGGA |
| 953 | GCAUAGCAUCACGGGGGAC |
| 954 | CAUAGCAUCACGGGGGACC |
| 955 | AUAGCAUCACGGGGGACCG |
| 956 | UAGCAUCACGGGGGACCGC |
| 957 | AGCAUCACGGGGGACCGCA |
| 958 | GCAUCACGGGGGACCGCAA |
| 959 | CAUCACGGGGGACCGCAAC |
| 960 | AUCACGGGGGACCGCAACA |
| 961 | UCACGGGGGACCGCAACAG |
| 962 | CACGGGGGACCGCAACAGC |
| 963 | ACGGGGGACCGCAACAGCC |
| 964 | CGGGGGACCGCAACAGCCG |
| 965 | GGGGGACCGCAACAGCCGC |
| 966 | GGGGACCGCAACAGCCGCC |
| 967 | GGGACCGCAACAGCCGCCU |
| 968 | GGACCGCAACAGCCGCCUG |
| 969 | GACCGCAACAGCCGCCUGG |
| 970 | ACCGCAACAGCCGCCUGGC |
| 971 | CCGCAACAGCCGCCUGGCC |
| 972 | CGCAACAGCCGCCUGGCCG |
| 973 | GCAACAGCCGCCUGGCCGU |
| 974 | CAACAGCCGCCUGGCCGUG |
| 975 | AACAGCCGCCUGGCCGUGC |
| 976 | ACAGCCGCCUGGCCGUGCA |
| 977 | CAGCCGCCUGGCCGUGCAG |
| 978 | AGCCGCCUGGCCGUGCAGC |
| 979 | GCCGCCUGGCCGUGCAGCU |
| 980 | CCGCCUGGCCGUGCAGCUG |
| 981 | CGCCUGGCCGUGCAGCUGC |
| 982 | GCCUGGCCGUGCAGCUGCG |
| 983 | CCUGGCCGUGCAGCUGCGG |
| 984 | CUGGCCGUGCAGCUGCGGG |
| 985 | UGGCCGUGCAGCUGCGGGA |
| 986 | GGCCGUGCAGCUGCGGGAC |
| 987 | GCCGUGCAGCUGCGGGACU |
| 988 | CCGUGCAGCUGCGGGACUG |
| 989 | CGUGCAGCUGCGGGACUGG |
| 990 | GUGCAGCUGCGGGACUGGG |
| 991 | UGCAGCUGCGGGACUGGGA |
| 992 | GCAGCUGCGGGACUGGGAU |
| 993 | CAGCUGCGGGACUGGGAUG |
| 994 | AGCUGCGGGACUGGGAUGG |
| 995 | GCUGCGGGACUGGGAUGGC |
| 996 | CUGCGGGACUGGGAUGGCA |
| 997 | UGCGGGACUGGGAUGGCAA |
| 998 | GCGGGACUGGGAUGGCAAC |
| 999 | CGGGACUGGGAUGGCAACG |
| 1000 | GGGACUGGGAUGGCAACGC |
| 1001 | GGACUGGGAUGGCAACGCC |
| 1002 | GACUGGGAUGGCAACGCCG |
| 1003 | ACUGGGAUGGCAACGCCGA |
| 1004 | CUGGGAUGGCAACGCCGAG |
| 1005 | UGGGAUGGCAACGCCGAGU |
| 1006 | GGGAUGGCAACGCCGAGUU |
| 1007 | GGAUGGCAACGCCGAGUUG |
| 1008 | GAUGGCAACGCCGAGUUGC |
| 1009 | AUGGCAACGCCGAGUUGCU |
| 1010 | UGGCAACGCCGAGUUGCUG |
| 1011 | GGCAACGCCGAGUUGCUGC |
| 1012 | GCAACGCCGAGUUGCUGCA |
| 1013 | CAACGCCGAGUUGCUGCAG |
| 1014 | AACGCCGAGUUGCUGCAGU |
| 1015 | ACGCCGAGUUGCUGCAGUU |
| 1016 | CGCCGAGUUGCUGCAGUUC |
| 1017 | GCCGAGUUGCUGCAGUUCU |
| 1018 | CCGAGUUGCUGCAGUUCUC |
| 1019 | CGAGUUGCUGCAGUUCUCC |
| 1020 | GAGUUGCUGCAGUUCUCCG |
| 1021 | AGUUGCUGCAGUUCUCCGU |
| 1022 | GUUGCUGCAGUUCUCCGUG |
| 1023 | UUGCUGCAGUUCUCCGUGC |
| 1024 | UGCUGCAGUUCUCCGUGCA |
| 1025 | GCUGCAGUUCUCCGUGCAC |
| 1026 | CUGCAGUUCUCCGUGCACC |
| 1027 | UGCAGUUCUCCGUGCACCU |
| 1028 | GCAGUUCUCCGUGCACCUG |
| 1029 | CAGUUCUCCGUGCACCUGG |
| 1030 | AGUUCUCCGUGCACCUGGG |
| 1031 | GUUCUCCGUGCACCUGGGU |
| 1032 | UUCUCCGUGCACCUGGGUG |
| 1033 | UCUCCGUGCACCUGGGUGG |
| 1034 | CUCCGUGCACCUGGGUGGC |
| 1035 | UCCGUGCACCUGGGUGGCG |
| 1036 | CCGUGCACCUGGGUGGCGA |
| 1037 | CGUGCACCUGGGUGGCGAG |
| 1038 | GUGCACCUGGGUGGCGAGG |
| 1039 | UGCACCUGGGUGGCGAGGA |
| 1040 | GCACCUGGGUGGCGAGGAC |
| 1041 | CACCUGGGUGGCGAGGACA |
| 1042 | ACCUGGGUGGCGAGGACAC |
| 1043 | CCUGGGUGGCGAGGACACG |
| 1044 | CUGGGUGGCGAGGACACGG |
| 1045 | UGGGUGGCGAGGACACGGC |
| 1046 | GGGUGGCGAGGACACGGCC |
| 1047 | GGUGGCGAGGACACGGCCU |
| 1048 | GUGGCGAGGACACGGCCUA |
| 1049 | UGGCGAGGACACGGCCUAU |
| 1050 | GGCGAGGACACGGCCUAUA |
| 1051 | GCGAGGACACGGCCUAUAG |
| 1052 | CGAGGACACGGCCUAUAGC |
| 1053 | GAGGACACGGCCUAUAGCC |
| 1054 | AGGACACGGCCUAUAGCCU |
| 1055 | GGACACGGCCUAUAGCCUG |
| 1056 | GACACGGCCUAUAGCCUGC |
| 1057 | ACACGGCCUAUAGCCUGCA |
| 1058 | CACGGCCUAUAGCCUGCAG |
| 1059 | ACGGCCUAUAGCCUGCAGC |
| 1060 | CGGCCUAUAGCCUGCAGCU |
| 1061 | GGCCUAUAGCCUGCAGCUC |
| 1062 | GCCUAUAGCCUGCAGCUCA |
| 1063 | CCUAUAGCCUGCAGCUCAC |
| 1064 | CUAUAGCCUGCAGCUCACU |
| 1065 | UAUAGCCUGCAGCUCACUG |
| 1066 | AUAGCCUGCAGCUCACUGC |
| 1067 | UAGCCUGCAGCUCACUGCA |
| 1068 | AGCCUGCAGCUCACUGCAC |
| 1069 | GCCUGCAGCUCACUGCACC |
| 1070 | CCUGCAGCUCACUGCACCC |
| 1071 | CUGCAGCUCACUGCACCCG |
| 1072 | UGCAGCUCACUGCACCCGU |
| 1073 | GCAGCUCACUGCACCCGUG |
| 1074 | CAGCUCACUGCACCCGUGG |
| 1075 | AGCUCACUGCACCCGUGGC |
| 1076 | GCUCACUGCACCCGUGGCC |
| 1077 | CUCACUGCACCCGUGGCCG |
| 1078 | UCACUGCACCCGUGGCCGG |
| 1079 | CACUGCACCCGUGGCCGGC |
| 1080 | ACUGCACCCGUGGCCGGCC |
| 1081 | CUGCACCCGUGGCCGGCCA |
| 1082 | UGCACCCGUGGCCGGCCAG |
| 1083 | GCACCCGUGGCCGGCCAGC |
| 1084 | CACCCGUGGCCGGCCAGCU |
| 1085 | ACCCGUGGCCGGCCAGCUG |
| 1086 | CCCGUGGCCGGCCAGCUGG |
| 1087 | CCGUGGCCGGCCAGCUGGG |
| 1088 | CGUGGCCGGCCAGCUGGGC |
| 1089 | GUGGCCGGCCAGCUGGGCG |
| 1090 | UGGCCGGCCAGCUGGGCGC |
| 1091 | GGCCGGCCAGCUGGGCGCC |
| 1092 | GCCGGCCAGCUGGGCGCCA |
| 1093 | CCGGCCAGCUGGGCGCCAC |
| 1094 | CGGCCAGCUGGGCGCCACC |
| 1095 | GGCCAGCUGGGCGCCACCA |
| 1096 | GCCAGCUGGGCGCCACCAC |
| 1097 | CCAGCUGGGCGCCACCACC |
| 1098 | CAGCUGGGCGCCACCACCG |
| 1099 | AGCUGGGCGCCACCACCGU |
| 1100 | GCUGGGCGCCACCACCGUC |
| 1101 | CUGGGCGCCACCACCGUCC |
| 1102 | UGGGCGCCACCACCGUCCC |
| 1103 | GGGCGCCACCACCGUCCCA |
| 1104 | GGCGCCACCACCGUCCCAC |
| 1105 | GCGCCACCACCGUCCCACC |
| 1106 | CGCCACCACCGUCCCACCC |
| 1107 | GCCACCACCGUCCCACCCA |
| 1108 | CCACCACCGUCCCACCCAG |
| 1109 | CACCACCGUCCCACCCAGC |
| 1110 | ACCACCGUCCCACCCAGCG |
| 1111 | CCACCGUCCCACC CAGCGG |
| 1112 | CACCGUCCCACCCAGCGGC |
| 1113 | ACCGUCCCACCCAGCGGCC |
| 1114 | CCGUCCCACCCAGCGGCCU |
| 1115 | CGUCCCACCCAGCGGCCUC |
| 1116 | GUCCCACCCAGCGGCCUCU |
| 1117 | UCCCACCCAGCGGCCUCUC |
| 1118 | CCCACCCAGCGGCCUCUCC |
| 1119 | CCACCCAGCGGCCUCUCCG |
| 1120 | CACCCAGCGGCCUCUCCGU |
| 1121 | ACCCAGCGGCCUCUCCGUA |
| 1122 | CCCAGCGGCCUCUCCGUAC |
| 1123 | CCAGCGGCCUCUCCGUACC |
| 1124 | CAGCGGCCUCUCCGUACCC |
| 1125 | AGCGGCCUCUCCGUACCCU |
| 1126 | GCGGCCUCUCCGUACCCUU |
| 1127 | CGGCCUCUCCGUACCCUUC |
| 1128 | GGCCUCUCCGUACCCUUCU |
| 1129 | GCCUCUCCGUACCCUUCUC |
| 1130 | CCUCUCCGUACCCUUCUCC |
| 1131 | CUCUCCGUACCCUUCUCCA |
| 1132 | UCUCCGUACCCUUCUCCAC |
| 1133 | CUCCGUACCCUUCUCCACU |
| 1134 | UCCGUACCCUUCUCCACUU |
| 1135 | CCGUACCCUUCUCCACUUG |
| 1136 | CGUACCCUUCUCCACUUGG |
| 1137 | GUACCCUUCUCCACUUGGG |
| 1138 | UACCCUUCUCCACUUGGGA |
| 1139 | ACCCUUCUCCACUUGGGAC |
| 1140 | CCCUUCUCCACUUGGGACC |
| 1141 | CCUUCUCCACUUGGGACCA |
| 1142 | CUUCUCCACUUGGGACCAG |
| 1143 | UUCUCCACUUGGGACCAGG |
| 1144 | UCUCCACUUGGGACCAGGA |
| 1145 | CUCCACUUGGGACCAGGAU |
| 1146 | UCCACUUGGGACCAGGAUC |
| 1147 | CCACUUGGGACCAGGAUCA |
| 1148 | CACUUGGGACCAGGAUCAC |
| 1149 | ACUUGGGACCAGGAUCACG |
| 1150 | CUUGGGACCAGGAUCACGA |
| 1151 | UUGGGACCAGGAUCACGAC |
| 1152 | UGGGACCAGGAUCACGACC |
| 1153 | GGGACCAGGAUCACGACCU |
| 1154 | GGACCAGGAUCACGACCUC |
| 1155 | GACCAGGAUCACGACCUCC |
| 1156 | ACCAGGAUCACGACCUCCG |
| 1157 | CCAGGAUCACGACCUCCGC |
| 1158 | CAGGAUCACGACCUCCGCA |
| 1159 | AGGAUCACGACCUCCGCAG |
| 1160 | GGAUCACGACCUCCGCAGG |
| 1161 | GAUCACGACCUCCGCAGGG |
| 1162 | AUCACGACCUCCGCAGGGA |
| 1163 | UCACGACCUCCGCAGGGAC |
| 1164 | CACGACCUCCGCAGGGACA |
| 1165 | ACGACCUCCGCAGGGACAA |
| 1166 | CGACCUCCGCAGGGACAAG |
| 1167 | GACCUCCGCAGGGACAAGA |
| 1168 | ACCUCCGCAGGGACAAGAA |
| 1169 | CCUCCGCAGGGACAAGAAC |
| 1170 | CUCCGCAGGGACAAGAACU |
| 1171 | UCCGCAGGGACAAGAACUG |
| 1172 | CCGCAGGGACAAGAACUGC |
| 1173 | CGCAGGGACAAGAACUGCG |
| 1174 | GCAGGGACAAGAACUGCGC |
| 1175 | CAGGGACAAGAACUGCGCC |
| 1176 | AGGGACAAGAACUGCGCCA |
| 1177 | GGGACAAGAACUGCGCCAA |
| 1178 | GGACAAGAACUGCGCCAAG |
| 1179 | GACAAGAACUGCGCCAAGA |
| 1180 | ACAAGAACUGCGCCAAGAG |
| 1181 | CAAGAACUGCGCCAAGAGC |
| 1182 | AAGAACUGCGCCAAGAGCC |
| 1183 | AGAACUGCGCCAAGAGCCU |
| 1184 | GAACUGCGCCAAGAGCCUC |
| 1185 | AACUGCGCCAAGAGCCUCU |
| 1186 | ACUGCGCCAAGAGCCUCUC |
| 1187 | CUGCGCCAAGAGCCUCUCU |
| 1188 | UGCGCCAAGAGCCUCUCUG |
| 1189 | GCGCCAAGAGCCUCUCUGG |
| 1190 | CGCCAAGAGCCUCUCUGGA |
| 1191 | GCCAAGAGCCUCUCUGGAG |
| 1192 | CCAAGAGCCUCUCUGGAGG |
| 1193 | CAAGAGCCUCUCUGGAGGC |
| 1194 | AAGAGCCUCUCUGGAGGCU |
| 1195 | AGAGCCUCUCUGGAGGCUG |
| 1196 | GAGCCUCUCUGGAGGCUGG |
| 1197 | AGCCUCUCUGGAGGCUGGU |
| 1198 | GCCUCUCUGGAGGCUGGUG |
| 1199 | CCUCUCUGGAGGCUGGUGG |
| 1200 | CUCUCUGGAGGCUGGUGGU |
| 1201 | UCUCUGGAGGCUGGUGGUU |
| 1202 | CUCUGGAGGCUGGUGGUUU |
| 1203 | UCUGGAGGCUGGUGGUUUG |
| 1204 | CUGGAGGCUGGUGGUUUGG |
| 1205 | UGGAGGCUGGUGGUUUGGC |
| 1206 | GGAGGCUGGUGGUUUGGCA |
| 1207 | GAGGCUGGUGGUUUGGCAC |
| 1208 | AGGCUGGUGGUUUGGCACC |
| 1209 | GGCUGGUGGUUUGGCACCU |
| 1210 | GCUGGUGGUUUGGCACCUG |
| 1211 | CUGGUGGUUUGGCACCUGC |
| 1212 | UGGUGGUUUGGCACCUGCA |
| 1213 | GGUGGUUUGGCACCUGCAG |
| 1214 | GUGGUUUGGCACCUGCAGC |
| 1215 | UGGUUUGGCACCUGCAGCC |
| 1216 | GGUUUGGCACCUGCAGCCA |
| 1217 | GUUUGGCACCUGCAGCCAU |
| 1218 | UUUGGCACCUGCAGCCAUU |
| 1219 | UUGGCACCUGCAGCCAUUC |
| 1220 | UGGCACCUGCAGCCAUUCC |
| 1221 | GGCACCUGCAGCCAUUCCA |
| 1222 | GCACCUGCAGCCAUUCCAA |
| 1223 | CACCUGCAGCCAUUCCAAC |
| 1224 | ACCUGCAGCCAUUCCAACC |
| 1225 | CCUGCAGCCAUUCCAACCU |
| 1226 | CUGCAGCCAUUCCAACCUC |
| 1227 | UGCAGCCAUUCCAACCUCA |
| 1228 | GCAGCCAUUCCAACCUCAA |
| 1229 | CAGCCAUUCCAACCUCAAC |
| 1230 | AGCCAUUCCAACCUCAACG |
| 1231 | GCCAUUCCAACCUCAACGG |
| 1232 | CCAUUCCAACCUCAACGGC |
| 1233 | CAUUCCAACCUCAACGGCC |
| 1234 | AUUCCAACCUCAACGGCCA |
| 1235 | UUCCAACCUCAACGGCCAG |
| 1236 | UCCAACCUCAACGGCCAGU |
| 1237 | CCAACCUCAACGGCCAGUA |
| 1238 | CAACCUCAACGGCCAGUAC |
| 1239 | AACCUCAACGGCCAGUACU |
| 1240 | ACCUCAACGGCCAGUACUU |
| 1241 | CCUCAACGGCCAGUACUUC |
| 1242 | CUCAACGGCCAGUACUUCC |
| 1243 | UCAACGGCCAGUACUUCCG |
| 1244 | CAACGGCCAGUACUUCCGC |
| 1245 | AACGGCCAGUACUUCCGCU |
| 1246 | ACGGCCAGUACUUCCGCUC |
| 1247 | CGGCCAGUACUUCCGCUCC |
| 1248 | GGCCAGUACUUCCGCUCCA |
| 1249 | GCCAGUACUUCCGCUCCAU |
| 1250 | CCAGUACUUCCGCUCCAUC |
| 1251 | CAGUACUUCCGCUCCAUCC |
| 1252 | AGUACUUCCGCUCCAUCCC |
| 1253 | GUACUUCCGCUCCAUCCCA |
| 1254 | UACUUCCGCUCCAUCCCAC |
| 1255 | ACUUCCGCUCCAUCCCACA |
| 1256 | CUUCCGCUCCAUCCCACAG |
| 1257 | UUCCGCUCCAUCCCACAGC |
| 1258 | UCCGCUCCAUCCCACAGCA |
| 1259 | CCGCUCCAUCCCACAGCAG |
| 1260 | CGCUCCAUCCCACAGCAGC |
| 1261 | GCUCCAUCCCACAGCAGCG |
| 1262 | CUCCAUCCCACAGCAGCGG |
| 1263 | UCCAUCCCACAGCAGCGGC |
| 1264 | CCAUCCCACAGCAGCGGCA |
| 1265 | CAUCCCACAGCAGCGGCAG |
| 1266 | AUCCCACAGCAGCGGCAGA |
| 1267 | UCCCACAGCAGCGGCAGAA |
| 1268 | CCCACAGCAGCGGCAGAAG |
| 1269 | CCACAGCAGCGGCAGAAGC |
| 1270 | CACAGCAGCGGCAGAAGCU |
| 1271 | ACAGCAGCGGCAGAAGCUU |
| 1272 | CAGCAGCGGCAGAAGCUUA |
| 1273 | AGCAGCGGCAGAAGCUUAA |
| 1274 | GCAGCGGCAGAAGCUUAAG |
| 1275 | CAGCGGCAGAAGCUUAAGA |
| 1276 | AGCGGCAGAAGCUUAAGAA |
| 1277 | GCGGCAGAAGCUUAAGAAG |
| 1278 | CGGCAGAAGCUUAAGAAGG |
| 1279 | GGCAGAAGCUUAAGAAGGG |
| 1280 | GCAGAAGCUUAAGAAGGGA |
| 1281 | CAGAAGCUUAAGAAGGGAA |
| 1282 | AGAAGCUUAAGAAGGGAAU |
| 1283 | GAAGCUUAAGAAGGGAAUC |
| 1284 | AAGCUUAAGAAGGGAAUCU |
| 1285 | AGCUUAAGAAGGGAAUCUU |
| 1286 | GCUUAAGAAGGGAAUCUUC |
| 1287 | CUUAAGAAGGGAAUCUUCU |
| 1288 | UUAAGAAGGGAAUCUUCUG |
| 1289 | UAAGAAGGGAAUCUUCUGG |
| 1290 | AAGAAGGGAAUCUUCUGGA |
| 1291 | AGAAGGGAAUCUUCUGGAA |
| 1292 | GAAGGGAAUCUUCUGGAAG |
| 1293 | AAGGGAAUCUUCUGGAAGA |
| 1294 | AGGGAAUCUUCUGGAAGAC |
| 1295 | GGGAAUCUUCUGGAAGACC |
| 1296 | GGAAUCUUCUGGAAGACCU |
| 1297 | GAAUCUUCUGGAAGACCUG |
| 1298 | AAUCUUCUGGAAGACCUGG |
| 1299 | AUCUUCUGGAAGACCUGGC |
| 1300 | UCUUCUGGAAGACCUGGCG |
| 1301 | CUUCUGGAAGACCUGGCGG |
| 1302 | UUCUGGAAGACCUGGCGGG |
| 1303 | UCUGGAAGACCUGGCGGGG |
| 1304 | CUGGAAGACCUGGCGGGGC |
| 1305 | UGGAAGACCUGGCGGGGCC |
| 1306 | GGAAGACCUGGCGGGGCCG |
| 1307 | GAAGACCUGGCGGGGCCGC |
| 1308 | AAGACCUGGCGGGGCCGCU |
| 1309 | AGACCUGGCGGGGCCGCUA |
| 1310 | GACCUGGCGGGGCCGCUAC |
| 1311 | ACCUGGCGGGGCCGCUACU |
| 1312 | CCUGGGGGGCCGCUACUA |
| 1313 | CUGGCGGGGCCGCUACUAC |
| 1314 | UGGCGGGGCCGCUACUACC |
| 1315 | GGCGGGGCCGCUACUACCC |
| 1316 | GCGGGGCCGCUACUACCCG |
| 1317 | CGGGGCCGCUACUACCCGC |
| 1318 | GGGGCCGCUACUACCCGCU |
| 1319 | GGGCCGCUACUACCCGCUG |
| 1320 | GGCCGCUACUACCCGCUGC |
| 1321 | GCCGCUACUACCCGCUGCA |
| 1322 | CCGCUACUACCCGCUGCAG |
| 1323 | CGCUACUACCCGCUGCAGG |
| 1324 | GCUACUACCCGCUGCAGGC |
| 1325 | CUACUACCCGCUGCAGGCC |
| 1326 | UACUACCCGCUGCAGGCCA |
| 1327 | ACUACCCGCUGCAGGCCAC |
| 1328 | CUACCCGCUGCAGGCCACC |
| 1329 | UACCCGCUGCAGGCCACCA |
| 1330 | ACCCGCUGCAGGCCACCAC |
| 1331 | CCCGCUGCAGGCCACCACC |
| 1332 | CCGCUGCAGGCCACCACCA |
| 1333 | CGCUGCAGGCCACCACCAU |
| 1334 | GCUGCAGGCCACCACCAUG |
| 1335 | CUGCAGGCCACCACCAUGU |
| 1336 | UGCAGGCCACCACCAUGUU |
| 1337 | GCAGGCCACCACCAUGUUG |
| 1338 | CAGGCCACCACCAUGUUGA |
| 1339 | AGGCCACCACCAUGUUGAU |
| 1340 | GGCCACCACCAUGUUGAUC |
| 1341 | GCCACCACCAUGUUGAUCC |
| 1342 | CCACCACCAUGUUGAUCCA |
| 1343 | CACCACCAUGUUGAUCCAG |
| 1344 | ACCACCAUGUUGAUCCAGC |
| 1345 | CCACCAUGUUGAUCCAGCC |
| 1346 | CACCAUGUUGAUCCAGCCC |
| 1347 | ACCAUGUUGAUCCAGCCCA |
| 1348 | CCAUGUUGAUCCAGCCCAU |
| 1349 | CAUGUUGAUCCAGCCCAUG |
| 1350 | AUGUUGAUCCAGCCCAUGG |
| 1351 | UGUUGAUCCAGCCCAUGGC |
| 1352 | GUUGAUCCAGCCCAUGGCA |
| 1353 | UUGAUCCAGCCCAUGGCAG |
| 1354 | UGAUCCAGCCCAUGGCAGC |
| 1355 | GAUCCAGCCCAUGGCAGCA |
| 1356 | AUCCAGCCCAUGGCAGCAG |
| 1357 | UCCAGCCCAUGGCAGCAGA |
| 1358 | CCAGCCCAUGGCAGCAGAG |
| 1359 | CAGCCCAUGGCAGCAGAGG |
| 1360 | AGCCCAUGGCAGCAGAGGC |
| 1361 | GCCCAUGGCAGCAGAGGCA |
| 1362 | CCCAUGGCAGCAGAGGCAG |
| 1363 | CCAUGGCAGCAGAGGCAGC |
| 1364 | CAUGGCAGCAGAGGCAGCC |
| 1365 | AUGGCAGCAGAGGCAGCCU |
| 1366 | UGGCAGCAGAGGCAGCCUC |
| 1367 | GGCAGCAGAGGCAGCCUCC |
| 1368 | GCAGCAGAGGCAGCCUCCU |
| 1369 | CAGCAGAGGCAGCCUCCUA |
| 1370 | AGCAGAGGCAGCCUCCUAG |
| 1371 | GCAGAGGCAGCCUCCUAGC |
| 1372 | CAGAGGCAGCCUCCUAGCG |
| 1373 | AGAGGCAGCCUCCUAGCGU |
| 1374 | GAGGCAGCCUCCUAGCGUC |
| 1375 | AGGCAGCCUCCUAGCGUCC |
| 1376 | GGCAGCCUCCUAGCGUCCU |
| 1377 | GCAGCCUCCUAGCGUCCUG |
| 1378 | CAGCCUCCUAGCGUCCUGG |
| 1379 | AGCCUCCUAGCGUCCUGGC |
| 1380 | GCCUCCUAGCGUCCUGGCU |
| 1381 | CCUCCUAGCGUCCUGGCUG |
| 1382 | CUCCUAGCGUCCUGGCUGG |
| 1383 | UCCUAGCGUCCUGGCUGGG |
| 1384 | CCUAGCGUCCUGGCUGGGC |
| 1385 | CUAGCGUCCUGGCUGGGCC |
| 1386 | UAGCGUCCUGGCUGGGCCU |
| 1387 | AGCGUCCUGGCUGGGCCUG |
| 1388 | GCGUCCUGGCUGGGCCUGG |
| 1389 | CGUCCUGGCUGGGCCUGGU |
| 1390 | GUCCUGGCUGGGCCUGGUC |
| 1391 | UCCUGGCUGGGCCUGGUCC |
| 1392 | CCUGGCUGGGCCUGGUCCC |
| 1393 | CUGGCUGGGCCUGGUCCCA |
| 1394 | UGGCUGGGCCUGGUCCCAG |
| 1395 | GGCUGGGCCUGGUCCCAGG |
| 1396 | GCUGGGCCUGGUCCCAGGC |
| 1397 | CUGGGCCUGGUCCCAGGCC |
| 1398 | UGGGCCUGGUCCCAGGCCC |
| 1399 | GGGCCUGGUCCCAGGCCCA |
| 1400 | GGCCUGGUCCCAGGCCCAC |
| 1401 | GCCUGGUCCCAGGCCCACG |
| 1402 | CCUGGUCCCAGGCCCACGA |
| 1403 | CUGGUCCCAGGCCCACGAA |
| 1404 | UGGUCCCAGGCCCACGAAA |
| 1405 | GGUCCCAGGCCCACGAAAG |
| 1406 | GUCCCAGGCCCACGAAAGA |
| 1407 | UCCCAGGCCCACGAAAGAC |
| 1408 | CCCAGGCCCACGAAAGACG |
| 1409 | CCAGGCCCACGAAAGACGG |
| 1410 | CAGGCCCACGAAAGACGGU |
| 1411 | AGGCCCACGAAAGACGGUG |
| 1412 | GGCCCACGAAAGACGGUGA |
| 1413 | GCCCACGAAAGACGGUGAC |
| 1414 | CCCACGAAAGACGGUGACU |
| 1415 | CCACGAAAGACGGUGACUC |
| 1416 | CACGAAAGACGGUGACUCU |
| 1417 | ACGAAAGACGGUGACUCUU |
| 1418 | CGAAAGACGGUGACUCUUG |
| 1419 | GAAAGACGGUGACUCUUGG |
| 1420 | AAAGACGGUGACUCUUGGC |
| 1421 | AAGACGGUGACUCUUGGCU |
| 1422 | AGACGGUGACUCUUGGCUC |
| 1423 | GACGGUGACUCUUGGCUCU |
| 1424 | ACGGUGACUCUUGGCUCUG |
| 1425 | CGGUGACUCUUGGCUCUGC |
| 1426 | GGUGACUCUUGGCUCUGCC |
| 1427 | GUGACUCUUGGCUCUGCCC |
| 1428 | UGACUCUUGGCUCUGCCCG |
| 1429 | GACUCUUGGCUCUGCCCGA |
| 1430 | ACUCUUGGCUCUGCCCGAG |
| 1431 | CUCUUGGCUCUGCCCGAGG |
| 1432 | UCUUGGCUCUGCCCGAGGA |
| 1433 | CUUGGCUCUGCCCGAGGAU |
| 1434 | UUGGCUCUGCCCGAGGAUG |
| 1435 | UGGCUCUGCCCGAGGAUGU |
| 1436 | GGCUCUGCCCGAGGAUGUG |
| 1437 | GCUCUGCCCGAGGAUGUGG |
| 1438 | CUCUGCCCGAGGAUGUGGC |
| 1439 | UCUGCCCGAGGAUGUGGCC |
| 1440 | CUGCCCGAGGAUGUGGCCG |
| 1441 | UGCCCGAGGAUGUGGCCGU |
| 1442 | GCCCGAGGAUGUGGCCGUU |
| 1443 | CCCGAGGAUGUGGCCGUUC |
| 1444 | CCGAGGAUGUGGCCGUUCC |
| 1445 | CGAGGAUGUGGCCGUUCCC |
| 1446 | GAGGAUGUGGCCGUUCCCU |
| 1447 | AGGAUGUGGCCGUUCCCUG |
| 1448 | GGAUGUGGCCGUUCCCUGC |
| 1449 | GAUGUGGCCGUUCCCUGCC |
| 1450 | AUGUGGCCGUUCCCUGCCU |
| 1451 | UGUGGCCGUUCCCUGCCUG |
| 1452 | GUGGCCGUUCCCUGCCUGG |
| 1453 | UGGCCGUUCCCUGCCUGGG |
| 1454 | GGCCGUUCCCUGCCUGGGC |
| 1455 | GCCGUUCCCUGCCUGGGCA |
| 1456 | CCGUUCCCUGCCUGGGCAG |
| 1457 | CGUUCCCUGCCUGGGCAGG |
| 1458 | GUUCCCUGCCUGGGCAGGG |
| 1459 | UUCCCUGCCUGGGCAGGGG |
| 1460 | UCCCUGCCUGGGCAGGGGC |
| 1461 | CCCUGCCUGGGCAGGGGCU |
| 1462 | CCUGCCUGGGCAGGGGCUC |
| 1463 | CUGCCUGGGCAGGGGCUCC |
| 1464 | UGCCUGGGCAGGGGCUCCA |
| 1465 | GCCUGGGCAGGGGCUCCAA |
| 1466 | CCUGGGCAGGGGCUCCAAG |
| 1467 | CUGGGCAGGGGCUCCAAGG |
| 1468 | UGGGCAGGGGCUCCAAGGA |
| 1469 | GGGCAGGGGCUCCAAGGAG |
| 1470 | GGCAGGGGCUCCAAGGAGG |
| 1471 | GCAGGGGCUCCAAGGAGGG |
| 1472 | CAGGGGCUCCAAGGAGGGG |
| 1473 | AGGGGCUCCAAGGAGGGGC |
| 1474 | GGGGCUCCAAGGAGGGGCC |
| 1475 | GGGCUCCAAGGAGGGGCCA |
| 1476 | GGCUCCAAGGAGGGGCCAU |
| 1477 | GCUCCAAGGAGGGGCCAUC |
| 1478 | CUCCAAGGAGGGGCCAUCU |
| 1479 | UCCAAGGAGGGGCCAUCUG |
| 1480 | CCAAGGAGGGGCCAUCUGG |
| 1481 | CAAGGAGGGGCCAUCUGGA |
| 1482 | AAGGAGGGGCCAUCUGGAA |
| 1483 | AGGAGGGGCCAUCUGGAAA |
| 1484 | GGAGGGGCCAUCUGGAAAC |
| 1485 | GAGGGGCCAUCUGGAAACU |
| 1486 | AGGGGCCAUCUGGAAACUU |
| 1487 | GGGGCCAUCUGGAAACUUG |
| 1488 | GGGCCAUCUGGAAACUUGU |
| 1489 | GGCCAUCUGGAAACUUGUG |
| 1490 | GCCAUCUGGAAACUUGUGG |
| 1491 | CCAUCUGGAAACUUGUGGA |
| 1492 | CAUCUGGAAACUUGUGGAC |
| 1493 | AUCUGGAAACUUGUGGACA |
| 1494 | UCUGGAAACUUGUGGACAG |
| 1495 | CUGGAAACUUGUGGACAGA |
| 1496 | UGGAAACUUGUGGACAGAG |
| 1497 | GGAAACUUGUGGACAGAGA |
| 1498 | GAAACUUGUGGACAGAGAA |
| 1499 | AAACUUGUGGACAGAGAAG |
| 1500 | AACUUGUGGACAGAGAAGA |
| 1501 | ACUUGUGGACAGAGAAGAA |
| 1502 | CUUGUGGACAGAGAAGAAG |
| 1503 | UUGUGGACAGAGAAGAAGA |
| 1504 | UGUGGACAGAGAAGAAGAC |
| 1505 | GUGGACAGAGAAGAAGACC |
| 1506 | UGGACAGAGAAGAAGACCA |
| 1507 | GGACAGAGAAGAAGACCAC |
| 1508 | GACAGAGAAGAAGACCACG |
| 1509 | ACAGAGAAGAAGACCACGA |
| 1510 | CAGAGAAGAAGACCACGAC |
| 1511 | AGAGAAGAAGACCACGACU |
| 1512 | GAGAAGAAGACCACGACUG |
| 1513 | AGAAGAAGACCACGACUGG |
| 1514 | GAAGAAGACCACGACUGGA |
| 1515 | AAGAAGACCACGACUGGAG |
| 1516 | AGAAGACCACGACUGGAGA |
| 1517 | GAAGACCACGACUGGAGAA |
| 1518 | AAGACCACGACUGGAGAAG |
| 1519 | AGACCACGACUGGAGAAGC |
| 1520 | GACCACGACUGGAGAAGCC |
| 1521 | ACCACGACUGGAGAAGCCC |
| 1522 | CCACGACUGGAGAAGCCCC |
| 1523 | CACGACUGGAGAAGCCCCC |
| 1524 | ACGACUGGAGAAGCCCCCU |
| 1525 | CGACUGGAGAAGCCCCCUU |
| 1526 | GACUGGAGAAGCCCCCUUU |
| 1527 | ACUGGAGAAGCCCCCUUUC |
| 1528 | CUGGAGAAGCCCCCUUUCU |
| 1529 | UGGAGAAGCCCCCUUUCUG |
| 1530 | GGAGAAGCCCCCUUUCUGA |
| 1531 | GAGAAGCCCCCUUUCUGAG |
| 1532 | AGAAGCCCCCUUUCUGAGU |
| 1533 | GAAGCCCCCUUUCUGAGUG |
| 1534 | AAGCCCCCUUUCUGAGUGC |
| 1535 | AGCCCCCUUUCUGAGUGCA |
| 1536 | GCCCCCUUUCUGAGUGCAG |
| 1537 | CCCCCUUUCUGAGUGCAGG |
| 1538 | CCCCUUUCUGAGUGCAGGG |
| 1539 | CCCUUUCUGAGUGCAGGGG |
| 1540 | CCUUUCUGAGUGCAGGGGG |
| 1541 | CUUUCUGAGUGCAGGGGGG |
| 1542 | UUUCUGAGUGCAGGGGGGC |
| 1543 | UUCUGAGUGCAGGGGGGCU |
| 1544 | UCUGAGUGCAGGGGGGCUG |
| 1545 | CUGAGUGCAGGGGGGCUGC |
| 1546 | UGAGUGCAGGGGGGCUGCA |
| 1547 | GAGUGCAGGGGGGCUGCAU |
| 1548 | AGUGCAGGGGGGCUGCAUG |
| 1549 | GUGCAGGGGGGCUGCAUGC |
| 1550 | UGCAGGGGGGCUGCAUGCG |
| 1551 | GCAGGGGGGCUGCAUGCGU |
| 1552 | CAGGGGGGCUGCAUGCGUU |
| 1553 | AGGGGGGCUGCAUGCGUUG |
| 1554 | GGGGGGCUGCAUGCGUUGC |
| 1555 | GGGGGCUGCAUGCGUUGCC |
| 1556 | GGGGCUGCAUGCGUUGCCU |
| 1557 | GGGCUGCAUGCGUUGCCUC |
| 1558 | GGCUGCAUGCGUUGCCUCC |
| 1559 | GCUGCAUGCGUUGCCUCCU |
| 1560 | CUGCAUGCGUUGCCUCCUG |
| 1561 | UGCAUGCGUUGCCUCCUGA |
| 1562 | GCAUGCGUUGCCUCCUGAG |
| 1563 | CAUGCGUUGCCUCCUGAGA |
| 1564 | AUGCGUUGCCUCCUGAGAU |
| 1565 | UGCGUUGCCUCCUGAGAUC |
| 1566 | GCGUUGCCUCCUGAGAUCG |
| 1567 | CGUUGCCUCCUGAGAUCGA |
| 1568 | GUUGCCUCCUGAGAUCGAG |
| 1569 | UUGCCUCCUGAGAUCGAGG |
| 1570 | UGCCUCCUGAGAUCGAGGC |
| 1571 | GCCUCCUGAGAUCGAGGCU |
| 1572 | CCUCCUGAGAUCGAGGCUG |
| 1573 | CUCCUGAGAUCGAGGCUGC |
| 1574 | UCCUGAGAUCGAGGCUGCA |
| 1575 | CCUGAGAUCGAGGCUGCAG |
| 1576 | CUGAGAUCGAGGCUGCAGG |
| 1577 | UGAGAUCGAGGCUGCAGGA |
| 1578 | GAGAUCGAGGCUGCAGGAU |
| 1579 | AGAUCGAGGCUGCAGGAUA |
| 1580 | GAUCGAGGCUGCAGGAUAU |
| 1581 | AUCGAGGCUGCAGGAUAUG |
| 1582 | UCGAGGCUGCAGGAUAUGC |
| 1583 | CGAGGCUGCAGGAUAUGCU |
| 1584 | GAGGCUGCAGGAUAUGCUC |
| 1585 | AGGCUGCAGGAUAUGCUCA |
| 1586 | GGCUGCAGGAUAUGCUCAG |
| 1587 | GCUGCAGGAUAUGCUCAGA |
| 1588 | CUGCAGGAUAUGCUCAGAC |
| 1589 | UGCAGGAUAUGCUCAGACU |
| 1590 | GCAGGAUAUGCUCAGACUC |
| 1591 | CAGGAUAUGCUCAGACUCU |
| 1592 | AGGAUAUGCUCAGACUCUA |
| 1593 | GGAUAUGCUCAGACUCUAG |
| 1594 | GAUAUGCUCAGACUCUAGA |
| 1595 | AUAUGCUCAGACUCUAGAG |
| 1596 | UAUGCUCAGACUCUAGAGG |
| 1597 | AUGCUCAGACUCUAGAGGC |
| 1598 | UGCUCAGACUCUAGAGGCG |
| 1599 | GCUCAGACUCUAGAGGCGU |
| 1600 | CUCAGACUCUAGAGGCGUG |
| 1601 | UCAGACUCUAGAGGCGUGG |
| 1602 | CAGACUCUAGAGGCGUGGA |
| 1603 | AGACUCUAGAGGCGUGGAC |
| 1604 | GACUCUAGAGGCGUGGACC |
| 1605 | ACUCUAGAGGCGUGGACCA |
| 1606 | CUCUAGAGGCGUGGACCAA |
| 1607 | UCUAGAGGCGUGGACCAAG |
| 1608 | CUAGAGGCGUGGACCAAGG |
| 1609 | UAGAGGCGUGGACCAAGGG |
| 1610 | AGAGGCGUGGACCAAGGGG |
| 1611 | GAGGCGUGGACCAAGGGGC |
| 1612 | AGGCGUGGACCAAGGGGCA |
| 1613 | GGCGUGGACCAAGGGGCAU |
| 1614 | GCGUGGACCAAGGGGCAUG |
| 1615 | CGUGGACCAAGGGGCAUGG |
| 1616 | GUGGACCAAGGGGCAUGGA |
| 1617 | UGGACCAAGGGGCAUGGAG |
| 1618 | GGACCAAGGGGCAUGGAGC |
| 1619 | GACCAAGGGGCAUGGAGCU |
| 1620 | ACCAAGGGGCAUGGAGCUU |
| 1621 | CCAAGGGGCAUGGAGCUUC |
| 1622 | CAAGGGGCAUGGAGCUUCA |
| 1623 | AAGGGGCAUGGAGCUUCAC |
| 1624 | AGGGGCAUGGAGCUUCACU |
| 1625 | GGGGCAUGGAGCUUCACUC |
| 1626 | GGGCAUGGAGCUUCACUCC |
| 1627 | GGCAUGGAGCUUCACUCCU |
| 1628 | GCAUGGAGCUUCACUCCUU |
| 1629 | CAUGGAGCUUCACUCCUUG |
| 1630 | AUGGAGCUUCACUCCUUGC |
| 1631 | UGGAGCUUCACUCCUUGCU |
| 1632 | GGAGCUUCACUCCUUGCUG |
| 1633 | GAGCUUCACUCCUUGCUGG |
| 1634 | AGCUUCACUCCUUGCUGGC |
| 1635 | GCUUCACUCCUUGCUGGCC |
| 1636 | CUUCACUCCUUGCUGGCCA |
| 1637 | UUCACUCCUUGCUGGCCAG |
| 1638 | UCACUCCUUGCUGGCCAGG |
| 1639 | CACUCCUUGCUGGCCAGGG |
| 1640 | ACUCCUUGCUGGCCAGGGA |
| 1641 | CUCCUUGCUGGCCAGGGAG |
| 1642 | UCCUUGCUGGCCAGGGAGU |
| 1643 | CCUUGCUGGCCAGGGAGUU |
| 1644 | CUUGCUGGCCAGGGAGUUG |
| 1645 | UUGCUGGCCAGGGAGUUGG |
| 1646 | UGCUGGCCAGGGAGUUGGG |
| 1647 | GCUGGCCAGGGAGUUGGGG |
| 1648 | CUGGCCAGGGAGUUGGGGA |
| 1649 | UGGCCAGGGAGUUGGGGAC |
| 1650 | GGCCAGGGAGUUGGGGACU |
| 1651 | GCCAGGGAGUUGGGGACUC |
| 1652 | CCAGGGAGUUGGGGACUCA |
| 1653 | CAGGGAGUUGGGGACUCAG |
| 1654 | AGGGAGUUGGGGACUCAGA |
| 1655 | GGGAGUUGGGGACUCAGAG |
| 1656 | GGAGUUGGGGACUCAGAGG |
| 1657 | GAGUUGGGGACUCAGAGGG |
| 1658 | AGUUGGGGACUCAGAGGGA |
| 1659 | GUUGGGGACUCAGAGGGAC |
| 1660 | UUGGGGACUCAGAGGGACC |
| 1661 | UGGGGACUCAGAGGGACCA |
| 1662 | GGGGACUCAGAGGGACCAC |
| 1663 | GGGACUCAGAGGGACCACU |
| 1664 | GGACUCAGAGGGACCACUU |
| 1665 | GACUCAGAGGGACCACUUG |
| 1666 | ACUCAGAGGGACCACUUGG |
| 1667 | CUCAGAGGGACCACUUGGG |
| 1668 | UCAGAGGGACCACUUGGGG |
| 1669 | CAGAGGGACCACUUGGGGC |
| 1670 | AGAGGGACCACUUGGGGCC |
| 1671 | GAGGGACCACUUGGGGCCA |
| 1672 | AGGGACCACUUGGGGCCAG |
| 1673 | GGGACCACUUGGGGCCAGC |
| 1674 | GGACCACUUGGGGCCAGCC |
| 1675 | GACCACUUGGGGCCAGCCA |
| 1676 | ACCACUUGGGGCCAGCCAG |
| 1677 | CCACUUGGGGCCAGCCAGA |
| 1678 | CACUUGGGGCCAGCCAGAC |
| 1679 | ACUUGGGGCCAGCCAGACU |
| 1680 | CUUGGGGCCAGCCAGACUG |
| 1681 | UUGGGGCCAGCCAGACUGG |
| 1682 | UGGGGCCAGCCAGACUGGC |
| 1683 | GGGGCCAGCCAGACUGGCC |
| 1684 | GGGCCAGCCAGACUGGCCU |
| 1685 | GGCCAGCCAGACUGGCCUC |
| 1686 | GCCAGCCAGACUGGCCUCA |
| 1687 | CCAGCCAGACUGGCCUCAA |
| 1688 | CAGCCAGACUGGCCUCAAU |
| 1689 | AGCCAGACUGGCCUCAAUG |
| 1690 | GCCAGACUGGCCUCAAUGG |
| 1691 | CCAGACUGGCCUCAAUGGC |
| 1692 | CAGACUGGCCUCAAUGGCG |
| 1693 | AGACUGGCCUCAAUGGCGG |
| 1694 | GACUGGCCUCAAUGGCGGA |
| 1695 | ACUGGCCUCAAUGGCGGAC |
| 1696 | CUGGCCUCAAUGGCGGACU |
| 1697 | UGGCCUCAAUGGCGGACUC |
| 1698 | GGCCUCAAUGGCGGACUCA |
| 1699 | GCCUCAAUGGCGGACUCAG |
| 1700 | CCUCAAUGGCGGACUCAGU |
| 1701 | CUCAAUGGCGGACUCAGUC |
| 1702 | UCAAUGGCGGACUCAGUCA |
| 1703 | CAAUGGCGGACUCAGUCAC |
| 1704 | AAUGGCGGACUCAGUCACA |
| 1705 | AUGGCGGACUCAGUCACAU |
| 1706 | UGGCGGACUCAGUCACAUU |
| 1707 | GGCGGACUCAGUCACAUUG |
| 1708 | GCGGACUCAGUCACAUUGA |
| 1709 | CGGACUCAGUCACAUUGAC |
| 1710 | GGACUCAGUCACAUUGACU |
| 1711 | GACUCAGUCACAUUGACUG |
| 1712 | ACUCAGUCACAUUGACUGA |
| 1713 | CUCAGUCACAUUGACUGAC |
| 1714 | UCAGUCACAUUGACUGACG |
| 1715 | CAGUCACAUUGACUGACGG |
| 1716 | AGUCACAUUGACUGACGGG |
| 1717 | GUCACAUUGACUGACGGGG |
| 1718 | UCACAUUGACUGACGGGGA |
| 1719 | CACAUUGACUGACGGGGAC |
| 1720 | ACAUUGACUGACGGGGACC |
| 1721 | CAUUGACUGACGGGGACCA |
| 1722 | AUUGACUGACGGGGACCAG |
| 1723 | UUGACUGACGGGGACCAGG |
| 1724 | UGACUGACGGGGACCAGGG |
| 1725 | GACUGACGGGGACCAGGGC |
| 1726 | ACUGACGGGGACCAGGGCU |
| 1727 | CUGACGGGGACCAGGGCUU |
| 1728 | UGACGGGGACCAGGGCUUG |
| 1729 | GACGGGGACCAGGGCUUGU |
| 1730 | ACGGGGACCAGGGCUUGUG |
| 1731 | CGGGGACCAGGGCUUGUGU |
| 1732 | GGGGACCAGGGCUUGUGUG |
| 1733 | GGGACCAGGGCUUGUGUGG |
| 1734 | GGACCAGGGCUUGUGUGGG |
| 1735 | GACCAGGGCUUGUGUGGGU |
| 1736 | ACCAGGGCUUGUGUGGGUC |
| 1737 | CCAGGGCUUGUGUGGGUCG |
| 1738 | CAGGGCUUGUGUGGGUCGA |
| 1739 | AGGGCUUGUGUGGGUCGAG |
| 1740 | GGGCUUGUGUGGGUCGAGA |
| 1741 | GGCUUGUGUGGGUCGAGAG |
| 1742 | GCUUGUGUGGGUCGAGAGC |
| 1743 | CUUGUGUGGGUCGAGAGCG |
| 1744 | UUGUGUGGGUCGAGAGCGC |
| 1745 | UGUGUGGGUCGAGAGCGCC |
| 1746 | GUGUGGGUCGAGAGCGCCC |
| 1747 | UGUGGGUCGAGAGCGCCCU |
| 1748 | GUGGGUCGAGAGCGCCCUC |
| 1749 | UGGGUCGAGAGCGCCCUCA |
| 1750 | GGGUCGAGAGCGCCCUCAU |
| 1751 | GGUCGAGAGCGCCCUCAUG |
| 1752 | GUCGAGAGCGCCCUCAUGG |
| 1753 | UCGAGAGCGCCCUCAUGGU |
| 1754 | CGAGAGCGCCCUCAUGGUG |
| 1755 | GAGAGCGCCCUCAUGGUGC |
| 1756 | AGAGCGCCCUCAUGGUGCU |
| 1757 | GAGCGCCCUCAUGGUGCUG |
| 1758 | AGCGCCCUCAUGGUGCUGG |
| 1759 | GCGCCCUCAUGGUGCUGGU |
| 1760 | CGCCCUCAUGGUGCUGGUG |
| 1761 | GCCCUCAUGGUGCUGGUGC |
| 1762 | CCCUCAUGGUGCUGGUGCU |
| 1763 | CCUCAUGGUGCUGGUGCUG |
| 1764 | CUCAUGGUGCUGGUGCUGU |
| 1765 | UCAUGGUGCUGGUGCUGUU |
| 1766 | CAUGGUGCUGGUGCUGUUG |
| 1767 | AUGGUGCUGGUGCUGUUGU |
| 1768 | UGGUGCUGGUGCUGUUGUG |
| 1769 | GGUGCUGGUGCUGUUGUGU |
| 1770 | GUGCUGGUGCUGUUGUGUG |
| 1771 | UGCUGGUGCUGUUGUGUGU |
| 1772 | GCUGGUGCUGUUGUGUGUA |
| 1773 | CUGGUGCUGUUGUGUGUAG |
| 1774 | UGGUGCUGUUGUGUGUAGG |
| 1775 | GGUGCUGUUGUGUGUAGGU |
| 1776 | GUGCUGUUGUGUGUAGGUC |
| 1777 | UGCUGUUGUGUGUAGGUCC |
| 1778 | GCUGUUGUGUGUAGGUCCC |
| 1779 | CUGUUGUGUGUAGGUCCCC |
| 1780 | UGUUGUGUGUAGGUCCCCU |
| 1781 | GUUGUGUGUAGGUCCCCUG |
| 1782 | UUGUGUGUAGGUCCCCUGG |
| 1783 | UGUGUGUAGGUCCCCUGGG |
| 1784 | GUGUGUAGGUCCCCUGGGG |
| 1785 | UGUGUAGGUCCCCUGGGGA |
| 1786 | GUGUAGGUCCCCUGGGGAC |
| 1787 | UGUAGGUCCCCUGGGGACA |
| 1788 | GUAGGUCCCCUGGGGACAC |
| 1789 | UAGGUCCCCUGGGGACACA |
| 1790 | AGGUCCCCUGGGGACACAA |
| 1791 | GGUCCCCUGGGGACACAAG |
| 1792 | GUCCCCUGGGGACACAAGC |
| 1793 | UCCCCUGGGGACACAAGCA |
| 1794 | CCCCUGGGGACACAAGCAG |
| 1795 | CCCUGGGGACACAAGCAGG |
| 1796 | CCUGGGGACACAAGCAGGC |
| 1797 | CUGGGGACACAAGCAGGCG |
| 1798 | UGGGGACACAAGCAGGCGC |
| 1799 | GGGGACACAAGCAGGCGCC |
| 1800 | GGGACACAAGCAGGCGCCA |
| 1801 | GGACACAAGCAGGCGCCAA |
| 1802 | GACACAAGCAGGCGCCAAU |
| 1803 | ACACAAGCAGGCGCCAAUG |
| 1804 | CACAAGCAGGCGCCAAUGG |
| 1805 | ACAAGCAGGCGCCAAUGGU |
| 1806 | CAAGCAGGCGCCAAUGGUA |
| 1807 | AAGCAGGCGCCAAUGGUAU |
| 1808 | AGCAGGCGCCAAUGGUAUC |
| 1809 | GCAGGCGCCAAUGGUAUCU |
| 1810 | CAGGCGCCAAUGGUAUCUG |
| 1811 | AGGCGCCAAUGGUAUCUGG |
| 1812 | GGCGCCAAUGGUAUCUGGG |
| 1813 | GCGCCAAUGGUAUCUGGGC |
| 1814 | CGCCAAUGGUAUCUGGGCG |
| 1815 | GCCAAUGGUAUCUGGGCGG |
| 1816 | CCAAUGGUAUCUGGGCGGA |
| 1817 | CAAUGGUAUCUGGGCGGAG |
| 1818 | AAUGGUAUCUGGGCGGAGC |
| 1819 | AUGGUAUCUGGGCGGAGCU |
| 1820 | UGGUAUCUGGGCGGAGCUC |
| 1821 | GGUAUCUGGGCGGAGCUCA |
| 1822 | GUAUCUGGGCGGAGCUCAC |
| 1823 | UAUCUGGGCGGAGCUCACA |
| 1824 | AUCUGGGCGGAGCUCACAG |
| 1825 | UCUGGGCGGAGCUCACAGA |
| 1826 | CUGGGCGGAGCUCACAGAG |
| 1827 | UGGGCGGAGCUCACAGAGU |
| 1828 | GGGCGGAGCUCACAGAGUU |
| 1829 | GGCGGAGCUCACAGAGUUC |
| 1830 | GCGGAGCUCACAGAGUUCU |
| 1831 | CGGAGCUCACAGAGUUCUU |
| 1832 | GGAGCUCACAGAGUUCUUG |
| 1833 | GAGCUCACAGAGUUCUUGG |
| 1834 | AGCUCACAGAGUUCUUGGA |
| 1835 | GCUCACAGAGUUCUUGGAA |
| 1836 | CUCACAGAGUUCUUGGAAU |
| 1837 | UCACAGAGUUCUUGGAAUA |
| 1838 | CACAGAGUUCUUGGAAUAA |
| 1839 | ACAGAGUUCUUGGAAUAAA |
| 1840 | CAGAGUUCUUGGAAUAAAA |
| 1841 | AGAGUUCUUGGAAUAAAAG |
| 1842 | GAGUUCUUGGAAUAAAAGC |
| 1843 | AGUUCUUGGAAUAAAAGCA |
| 1844 | GUUCUUGGAAUAAAAGCAA |
| 1845 | UUCUUGGAAUAAAAGCAAC |
| 1846 | UCUUGGAAUAAAAGCAACC |
| 1847 | CUUGGAAUAAAAGCAACCU |
| 1848 | UUGGAAUAAAAGCAACCUC |
| 1849 | UGGAAUAAAAGCAACCUCA |
| 1850 | GGAAUAAAAGCAACCUCAG |
| 1851 | GAAUAAAAGCAACCUCAGA |
| 1852 | AAUAAAAGCAACCUCAGAA |
| 1853 | AUAAAAGCAACCUCAGAAC |
| 1854 | UAAAAGCAACCUCAGAACA |
| 1855 | UCCGCUCAGCUCGGCUUCU |
| 1856 | AUCCGCUCAGCUCGGCUUC |
| 1857 | GAUCCGCUCAGCUCGGCUU |
| 1858 | GGAUCCGCUCAGCUCGGCU |
| 1859 | AGGAUCCGCUCAGCUCGGC |
| 1860 | GAGGAUCCGCUCAGCUCGG |
| 1861 | UGAGGAUCCGCUCAGCUCG |
| 1862 | GUGAGGAUCCGCUCAGCUC |
| 1863 | UGUGAGGAUCCGCUCAGCU |
| 1864 | GUGUGAGGAUCCGCUCAGC |
| 1865 | CGUGUGAGGAUCCGCUCAG |
| 1866 | UCGUGUGAGGAUCCGCUCA |
| 1867 | GUCGUGUGAGGAUCCGCUC |
| 1868 | AGUCGUGUGAGGAUCCGCU |
| 1869 | CAGUCGUGUGAGGAUCCGC |
| 1870 | ACAGUCGUGUGAGGAUCCG |
| 1871 | CACAGUCGUGUGAGGAUCC |
| 1872 | UCACAGUCGUGUGAGGAUC |
| 1873 | AUCACAGUCGUGUGAGGAU |
| 1874 | GAUCACAGUCGUGUGAGGA |
| 1875 | GGAUCACAGUCGUGUGAGG |
| 1876 | CGGAUCACAGUCGUGUGAG |
| 1877 | UCGGAUCACAGUCGUGUGA |
| 1878 | AUCGGAUCACAGUCGUGUG |
| 1879 | AAUCGGAUCACAGUCGUGU |
| 1880 | GAAUCGGAUCACAGUCGUG |
| 1881 | AGAAUCGGAUCACAGUCGU |
| 1882 | AAGAAUCGGAUCACAGUCG |
| 1883 | AAAGAAUCGGAUCACAGUC |
| 1884 | GAAAGAAUCGGAUCACAGU |
| 1885 | GGAAAGAAUCGGAUCACAG |
| 1886 | UGGAAAGAAUCGGAUCACA |
| 1887 | CUGGAAAGAAUCGGAUCAC |
| 1888 | GCUGGAAAGAAUCGGAUCA |
| 1889 | CGCUGGAAAGAAUCGGAUC |
| 1890 | CCGCUGGAAAGAAUCGGAU |
| 1891 | GCCGCUGGAAAGAAUCGGA |
| 1892 | AGCCGCUGGAAAGAAUCGG |
| 1893 | AAGCCGCUGGAAAGAAUCG |
| 1894 | GAAGCCGCUGGAAAGAAUC |
| 1895 | AGAAGCCGCUGGAAAGAAU |
| 1896 | CAGAAGCCGCUGGAAAGAA |
| 1897 | GCAGAAGCCGCUGGAAAGA |
| 1898 | UGCAGAAGCCGCUGGAAAG |
| 1899 | UUGCAGAAGCCGCUGGAAA |
| 1900 | GUUGCAGAAGCCGCUGGAA |
| 1901 | GGUUGCAGAAGCCGCUGGA |
| 1902 | UGGUUGCAGAAGCCGCUGG |
| 1903 | UUGGUUGCAGAAGCCGCUG |
| 1904 | CUUGGUUGCAGAAGCCGCU |
| 1905 | GCUUGGUUGCAGAAGCCGC |
| 1906 | CGCUUGGUUGCAGAAGCCG |
| 1907 | CCGCUUGGUUGCAGAAGCC |
| 1908 | CCCGCUUGGUUGCAGAAGC |
| 1909 | ACCCGCUUGGUUGCAGAAG |
| 1910 | GACCCGCUUGGUUGCAGAA |
| 1911 | AGACCCGCUUGGUUGCAGA |
| 1912 | AAGACCCGCUUGGUUGCAG |
| 1913 | UAAGACCCGCUUGGUUGCA |
| 1914 | GUAAGACCCGCUUGGUUGC |
| 1915 | GGUAAGACCCGCUUGGUUG |
| 1916 | GGGUAAGACCCGCUUGGUU |
| 1917 | GGGGUAAGACCCGCUUGGU |
| 1918 | GGGGGUAAGACCCGCUUGG |
| 1919 | CGGGGGUAAGACCCGCUUG |
| 1920 | CCGGGGGUAAGACCCGCUU |
| 1921 | ACCGGGGGUAAGACCCGCU |
| 1922 | GACCGGGGGUAAGACCCGC |
| 1923 | GGACCGGGGGUAAGACCCG |
| 1924 | AGGACCGGGGGUAAGACCC |
| 1925 | GAGGACCGGGGGUAAGACC |
| 1926 | GGAGGACCGGGGGUAAGAC |
| 1927 | CGGAGGACCGGGGGUAAGA |
| 1928 | GCGGAGGACCGGGGGUAAG |
| 1929 | CGCGGAGGACCGGGGGUAA |
| 1930 | ACGCGGAGGACCGGGGGUA |
| 1931 | GACGCGGAGGACCGGGGGU |
| 1932 | AGACGCGGAGGACCGGGGG |
| 1933 | GAGACGCGGAGGACCGGGG |
| 1934 | GGAGACGCGGAGGACCGGG |
| 1935 | UGGAGACGCGGAGGACCGG |
| 1936 | CUGGAGACGCGGAGGACCG |
| 1937 | ACUGGAGACGCGGAGGACC |
| 1938 | GACUGGAGACGCGGAGGAC |
| 1939 | GGACUGGAGACGCGGAGGA |
| 1940 | AGGACUGGAGACGCGGAGG |
| 1941 | GAGGACUGGAGACGCGGAG |
| 1942 | CGAGGACUGGAGACGCGGA |
| 1943 | GCGAGGACUGGAGACGCGG |
| 1944 | UGCGAGGACUGGAGACGCG |
| 1945 | GUGCGAGGACUGGAGACGC |
| 1946 | GGUGCGAGGACUGGAGACG |
| 1947 | AGGUGCGAGGACUGGAGAC |
| 1948 | CAGGUGCGAGGACUGGAGA |
| 1949 | CCAGGUGCGAGGACUGGAG |
| 1950 | UCCAGGUGCGAGGACUGGA |
| 1951 | UUCCAGGUGCGAGGACUGG |
| 1952 | GUUCCAGGUGCGAGGACUG |
| 1953 | GGUUCCAGGUGCGAGGACU |
| 1954 | GGGUUCCAGGUGCGAGGAC |
| 1955 | GGGGUUCCAGGUGCGAGGA |
| 1956 | UGGGGUUCCAGGUGCGAGG |
| 1957 | UUGGGGUUCCAGGUGCGAG |
| 1958 | GUUGGGGUUCCAGGUGCGA |
| 1959 | CGUUGGGGUUCCAGGUGCG |
| 1960 | ACGUUGGGGUUCCAGGUGC |
| 1961 | GACGUUGGGGUUCCAGGUG |
| 1962 | GGACGUUGGGGUUCCAGGU |
| 1963 | GGGACGUUGGGGUUCCAGG |
| 1964 | GGGGACGUUGGGGUUCCAG |
| 1965 | CGGGGACGUUGGGGUUCCA |
| 1966 | UCGGGGACGUUGGGGUUCC |
| 1967 | CUCGGGGACGUUGGGGUUC |
| 1968 | UCUCGGGGACGUUGGGGUU |
| 1969 | CUCUCGGGGACGUUGGGGU |
| 1970 | ACUCUCGGGGACGUUGGGG |
| 1971 | GACUCUCGGGGACGUUGGG |
| 1972 | GGACUCUCGGGGACGUUGG |
| 1973 | GGGACUCUCGGGGACGUUG |
| 1974 | GGGGACUCUCGGGGACGUU |
| 1975 | CGGGGACUCUCGGGGACGU |
| 1976 | UCGGGGACUCUCGGGGACG |
| 1977 | UUCGGGGACUCUCGGGGAC |
| 1978 | AUUCGGGGACUCUCGGGGA |
| 1979 | GAUUCGGGGACUCUCGGGG |
| 1980 | GGAUUCGGGGACUCUCGGG |
| 1981 | GGGAUUCGGGGACUCUCGG |
| 1982 | GGGGAUUCGGGGACUCUCG |
| 1983 | CGGGGAUUCGGGGACUCUC |
| 1984 | GCGGGGAUUCGGGGACUCU |
| 1985 | AGCGGGGAUUCGGGGACUC |
| 1986 | GAGCGGGGAUUCGGGGACU |
| 1987 | GGAGCGGGGAUUCGGGGAC |
| 1988 | GGGAGCGGGGAUUCGGGGA |
| 1989 | UGGGAGCGGGGAUUCGGGG |
| 1990 | CUGGGAGCGGGGAUUCGGG |
| 1991 | CCUGGGAGCGGGGAUUCGG |
| 1992 | GCCUGGGAGCGGGGAUUCG |
| 1993 | AGCCUGGGAGCGGGGAUUC |
| 1994 | UAGCCUGGGAGCGGGGAUU |
| 1995 | GUAGCCUGGGAGCGGGGAU |
| 1996 | GGUAGCCUGGGAGCGGGGA |
| 1997 | AGGUAGCCUGGGAGCGGGG |
| 1998 | UAGGUAGCCUGGGAGCGGG |
| 1999 | UUAGGUAGCCUGGGAGCGG |
| 2000 | CUUAGGUAGCCUGGGAGCG |
| 2001 | UCUUAGGUAGCCUGGGAGC |
| 2002 | CUCUUAGGUAGCCUGGGAG |
| 2003 | CCUCUUAGGUAGCCUGGGA |
| 2004 | UCCUCUUAGGUAGCCUGGG |
| 2005 | AUCCUCUUAGGUAGCCUGG |
| 2006 | CAUCCUCUUAGGUAGCCUG |
| 2007 | UCAUCCUCUUAGGUAGCCU |
| 2008 | CUCAUCCUCUUAGGUAGCC |
| 2009 | GCUCAUCCUCUUAGGUAGC |
| 2010 | CGCUCAUCCUCUUAGGUAG |
| 2011 | CCGCUCAUCCUCUUAGGUA |
| 2012 | ACCGCUCAUCCUCUUAGGU |
| 2013 | CACCGCUCAUCCUCUUAGG |
| 2014 | GCACCGCUCAUCCUCUUAG |
| 2015 | AGCACCGCUCAUCCUCUUA |
| 2016 | GAGCACCGCUCAUCCUCUU |
| 2017 | GGAGCACCGCUCAUCCUCU |
| 2018 | CGGAGCACCGCUCAUCCUC |
| 2019 | UCGGAGCACCGCUCAUCCU |
| 2020 | GUCGGAGCACCGCUCAUCC |
| 2021 | CGUCGGAGCACCGCUCAUC |
| 2022 | CCGUCGGAGCACCGCUCAU |
| 2023 | GCCGUCGGAGCACCGCUCA |
| 2024 | GGCCGUCGGAGCACCGCUC |
| 2025 | CGGCCGUCGGAGCACCGCU |
| 2026 | CCGGCCGUCGGAGCACCGC |
| 2027 | CCCGGCCGUCGGAGCACCG |
| 2028 | CCCCGGCCGUCGGAGCACC |
| 2029 | GCCCCGGCCGUCGGAGCAC |
| 2030 | UGCCCCGGCCGUCGGAGCA |
| 2031 | CUGCCCCGGCCGUCGGAGC |
| 2032 | GCUGCCCCGGCCGUCGGAG |
| 2033 | GGCUGCC CCGGCCGUCGGA |
| 2034 | GGGCUGCCCCGGCCGUCGG |
| 2035 | AGGGCUGCCCCGGCCGUCG |
| 2036 | CAGGGCUGCCCCGGCCGUC |
| 2037 | UCAGGGCUGCCCCGGCCGU |
| 2038 | AUCAGGGCUGCCCCGGCCG |
| 2039 | CAUCAGGGCUGCCCCGGCC |
| 2040 | GCAUCAGGGCUGCCCCGGC |
| 2041 | AGCAUCAGGGCUGCCCCGG |
| 2042 | GAGCAUCAGGGCUGCCCCG |
| 2043 | AGAGCAUCAGGGCUGCCCC |
| 2044 | CAGAGCAUCAGGGCUGCCC |
| 2045 | GCAGAGCAUCAGGGCUGCC |
| 2046 | CGCAGAGCAUCAGGGCUGC |
| 2047 | GCGCAGAGCAUCAGGGCUG |
| 2048 | GGCGCAGAGCAUCAGGGCU |
| 2049 | CGGCGCAGAGCAUCAGGGC |
| 2050 | GCGGCGCAGAGCAUCAGGG |
| 2051 | GGCGGCGCAGAGCAUCAGG |
| 2052 | UGGCGGCGCAGAGCAUCAG |
| 2053 | GUGGCGGCGCAGAGCAUCA |
| 2054 | GGUGGCGGCGCAGAGCAUC |
| 2055 | CGGUGGCGGCGCAGAGCAU |
| 2056 | GCGGUGGCGGCGCAGAGCA |
| 2057 | GGCGGUGGCGGCGCAGAGC |
| 2058 | CGGCGGUGGCGGCGCAGAG |
| 2059 | ACGGCGGUGGCGGCGCAGA |
| 2060 | CACGGCGGUGGCGGCGCAG |
| 2061 | GCACGGCGGUGGCGGCGCA |
| 2062 | AGCACGGCGGUGGCGGCGC |
| 2063 | UAGCACGGCGGUGGCGGCG |
| 2064 | GUAGCACGGCGGUGGCGGC |
| 2065 | AGUAGCACGGCGGUGGCGG |
| 2066 | CAGUAGCACGGCGGUGGCG |
| 2067 | UCAGUAGCACGGCGGUGGC |
| 2068 | CUCAGUAGCACGGCGGUGG |
| 2069 | GCUCAGUAGCACGGCGGUG |
| 2070 | CGCUCAGUAGCACGGCGGU |
| 2071 | GCGCUCAGUAGCACGGCGG |
| 2072 | AGCGCUCAGUAGCACGGCG |
| 2073 | GAGCGCUCAGUAGCACGGC |
| 2074 | UGAGCGCUCAGUAGCACGG |
| 2075 | CUGAGCGCUCAGUAGCACG |
| 2076 | CCUGAGCGCUCAGUAGCAC |
| 2077 | CCCUGAGCGCUCAGUAGCA |
| 2078 | GCCCUGAGCGCUCAGUAGC |
| 2079 | CGCCCUGAGCGCUCAGUAG |
| 2080 | CCGCCCUGAGCGCUCAGUA |
| 2081 | UCCGCCCUGAGCGCUCAGU |
| 2082 | GUCCGCCCUGAGCGCUCAG |
| 2083 | GGUCCGCCCUGAGCGCUCA |
| 2084 | GGGUCCGCCCUGAGCGCUC |
| 2085 | CGGGUCCGCCCUGAGCGCU |
| 2086 | ACGGGUCCGCCCUGAGCGC |
| 2087 | CACGGGUCCGCCCUGAGCG |
| 2088 | GCACGGGUCCGCCCUGAGC |
| 2089 | UGCACGGGUCCGCCCUGAG |
| 2090 | CUGCACGGGUCCGCCCUGA |
| 2091 | ACUGCACGGGUCCGCCCUG |
| 2092 | GACUGCACGGGUCCGCCCU |
| 2093 | GGACUGCACGGGUCCGCCC |
| 2094 | UGGACUGCACGGGUCCGCC |
| 2095 | UUGGACUGCACGGGUCCGC |
| 2096 | CUUGGACUGCACGGGUCCG |
| 2097 | ACUUGGACUGCACGGGUCC |
| 2098 | GACUUGGACUGCACGGGUC |
| 2099 | CGACUUGGACUGCACGGGU |
| 2100 | GCGACUUGGACUGCACGGG |
| 2101 | GGCGACUUGGACUGCACGG |
| 2102 | CGGCGACUUGGACUGCACG |
| 2103 | GCGGCGACUUGGACUGCAC |
| 2104 | CGCGGCGACUUGGACUGCA |
| 2105 | GCGCGGCGACUUGGACUGC |
| 2106 | AGCGCGGCGACUUGGACUG |
| 2107 | AAGCGCGGCGACUUGGACU |
| 2108 | AAAGCGCGGCGACUUGGAC |
| 2109 | CAAAGCGCGGCGACUUGGA |
| 2110 | GCAAAGCGCGGCGACUUGG |
| 2111 | CGCAAAGCGCGGCGACUUG |
| 2112 | ACGCAAAGCGCGGCGACUU |
| 2113 | GACGCAAAGCGCGGCGACU |
| 2114 | GGACGCAAAGCGCGGCGAC |
| 2115 | AGGACGCAAAGCGCGGCGA |
| 2116 | CAGGACGCAAAGCGCGGCG |
| 2117 | CCAGGACGCAAAGCGCGGC |
| 2118 | CCCAGGACGCAAAGCGCGG |
| 2119 | UCCCAGGACGCAAAGCGCG |
| 2120 | GUCCCAGGACGCAAAGCGC |
| 2121 | CGUCCCAGGACGCAAAGCG |
| 2122 | UCGUCCCAGGACGCAAAGC |
| 2123 | CUCGUCCCAGGACGCAAAG |
| 2124 | UCUCGUCCCAGGACGCAAA |
| 2125 | AUCUCGUCCCAGGACGCAA |
| 2126 | CAUCUCGUCCCAGGACGCA |
| 2127 | UCAUCUCGUCCCAGGACGC |
| 2128 | UUCAUCUCGUCCCAGGACG |
| 2129 | AUUCAUCUCGUCCCAGGAC |
| 2130 | CAUUCAUCUCGUCCCAGGA |
| 2131 | ACAUUCAUCUCGUCCCAGG |
| 2132 | GACAUUCAUCUCGUCCCAG |
| 2133 | GGACAUUCAUCUCGUCCCA |
| 2134 | AGGACAUUCAUCUCGUCCC |
| 2135 | CAGGACAUUCAUCUCGUCC |
| 2136 | CCAGGACAUUCAUCUCGUC |
| 2137 | GCCAGGACAUUCAUCUCGU |
| 2138 | CGCCAGGACAUUCAUCUCG |
| 2139 | GCGCCAGGACAUUCAUCUC |
| 2140 | UGCGCCAGGACAUUCAUCU |
| 2141 | GUGCGCCAGGACAUUCAUC |
| 2142 | CGUGCGCCAGGACAUUCAU |
| 2143 | CCGUGCGCCAGGACAUUCA |
| 2144 | UCCGUGCGCCAGGACAUUC |
| 2145 | GUCCGUGCGCCAGGACAUU |
| 2146 | AGUCCGUGCGCCAGGACAU |
| 2147 | GAGUCCGUGCGCCAGGACA |
| 2148 | GGAGUCCGUGCGCCAGGAC |
| 2149 | AGGAGUCCGUGCGCCAGGA |
| 2150 | CAGGAGUCCGUGCGCCAGG |
| 2151 | GCAGGAGUCCGUGCGCCAG |
| 2152 | UGCAGGAGUCCGUGCGCCA |
| 2153 | CUGCAGGAGUCCGUGCGCC |
| 2154 | GCUGCAGGAGUCCGUGCGC |
| 2155 | AGCUGCAGGAGUCCGUGCG |
| 2156 | GAGCUGCAGGAGUCCGUGC |
| 2157 | CGAGCUGCAGGAGUCCGUG |
| 2158 | CCGAGCUGCAGGAGUCCGU |
| 2159 | GCCGAGCUGCAGGAGUCCG |
| 2160 | GGCCGAGCUGCAGGAGUCC |
| 2161 | UGGCCGAGCUGCAGGAGUC |
| 2162 | CUGGCCGAGCUGCAGGAGU |
| 2163 | CCUGGCCGAGCUGCAGGAG |
| 2164 | CCCUGGCCGAGCUGCAGGA |
| 2165 | CCCCUGGCCGAGCUGCAGG |
| 2166 | GCCCCUGGCCGAGCUGCAG |
| 2167 | AGCCCCUGGCCGAGCUGCA |
| 2168 | CAGCCCCUGGCCGAGCUGC |
| 2169 | GCAGCCCCUGGCCGAGCUG |
| 2170 | CGCAGCCCCUGGCCGAGCU |
| 2171 | GCGCAGCCCCUGGCCGAGC |
| 2172 | CGCGCAGCCCCUGGCCGAG |
| 2173 | UCGCGCAGCCCCUGGCCGA |
| 2174 | UUCGCGCAGCCCCUGGCCG |
| 2175 | GUUCGCGCAGCCCCUGGCC |
| 2176 | UGUUCGCGCAGCCCCUGGC |
| 2177 | GUGUUCGCGCAGCCCCUGG |
| 2178 | CGUGUUCGCGCAGCCCCUG |
| 2179 | GCGUGUUCGCGCAGCCCCU |
| 2180 | CGCGUGUUCGCGCAGCCCC |
| 2181 | CCGCGUGUUCGCGCAGCCC |
| 2182 | UCCGCGUGUUCGCGCAGCC |
| 2183 | CUCCGCGUGUUCGCGCAGC |
| 2184 | GCUCCGCGUGUUCGCGCAG |
| 2185 | CGCUCCGCGUGUUCGCGCA |
| 2186 | GCGCUCCGCGUGUUCGCGC |
| 2187 | UGCGCUCCGCGUGUUCGCG |
| 2188 | GUGCGCUCCGCGUGUUCGC |
| 2189 | GGUGCGCUCCGCGUGUUCG |
| 2190 | GGGUGCGCUCCGCGUGUUC |
| 2191 | CGGGUGCGCUCCGCGUGUU |
| 2192 | GCGGGUGCGCUCCGCGUGU |
| 2193 | UGCGGGUGCGCUCCGCGUG |
| 2194 | CUGCGGGUGCGCUCCGCGU |
| 2195 | ACUGCGGGUGCGCUCCGCG |
| 2196 | GACUGCGGGUGCGCUCCGC |
| 2197 | UGACUGCGGGUGCGCUCCG |
| 2198 | CUGACUGCGGGUGCGCUCC |
| 2199 | GCUGACUGCGGGUGCGCUC |
| 2200 | AGCUGACUGCGGGUGCGCU |
| 2201 | CAGCUGACUGCGGGUGCGC |
| 2202 | UCAGCUGACUGCGGGUGCG |
| 2203 | CUCAGCUGACUGCGGGUGC |
| 2204 | GCUCAGCUGACUGCGGGUG |
| 2205 | CGCUCAGCUGACUGCGGGU |
| 2206 | GCGCUCAGCUGACUGCGGG |
| 2207 | CGCGCUCAGCUGACUGCGG |
| 2208 | GCGCGCUCAGCUGACUGCG |
| 2209 | AGCGCGCUCAGCUGACUGC |
| 2210 | CAGCGCGCUCAGCUGACUG |
| 2211 | CCAGCGCGCUCAGCUGACU |
| 2212 | UCCAGCGCGCUCAGCUGAC |
| 2213 | CUCCAGCGCGCUCAGCUGA |
| 2214 | GCUCCAGCGCGCUCAGCUG |
| 2215 | CGCUCCAGCGCGCUCAGCU |
| 2216 | CCGCUCCAGCGCGCUCAGC |
| 2217 | GCCGCUCCAGCGCGCUCAG |
| 2218 | CGCCGCUCCAGCGCGCUCA |
| 2219 | GCGCCGCUCCAGCGCGCUC |
| 2220 | GGCGCCGCUCCAGCGCGCU |
| 2221 | AGGCGCCGCUCCAGCGCGC |
| 2222 | CAGGCGCCGCUCCAGCGCG |
| 2223 | UCAGGCGCCGCUCCAGCGC |
| 2224 | CUCAGGCGCCGCUCCAGCG |
| 2225 | GCUCAGGCGCCGCUCCAGC |
| 2226 | CGCUCAGGCGCCGCUCCAG |
| 2227 | GCGCUCAGGCGCCGCUCCA |
| 2228 | CGCGCUCAGGCGCCGCUCC |
| 2229 | ACGCGCUCAGGCGCCGCUC |
| 2230 | CACGCGCUCAGGCGCCGCU |
| 2231 | GCACGCGCUCAGGCGCCGC |
| 2232 | CGCACGCGCUCAGGCGCCG |
| 2233 | CCGCACGCGCUCAGGCGCC |
| 2234 | CCCGCACGCGCUCAGGCGC |
| 2235 | ACCCGCACGCGCUCAGGCG |
| 2236 | GACCCGCACGCGCUCAGGC |
| 2237 | GGACCCGCACGCGCUCAGG |
| 2238 | CGGACCCGCACGCGCUCAG |
| 2239 | GCGGACCCGCACGCGCUCA |
| 2240 | GGCGGACCCGCACGCGCUC |
| 2241 | AGGCGGACCCGCACGCGCU |
| 2242 | CAGGCGGACCCGCACGCGC |
| 2243 | ACAGGCGGACCCGCACGCG |
| 2244 | GACAGGCGGACCCGCACGC |
| 2245 | UGACAGGCGGACCCGCACG |
| 2246 | CUGACAGGCGGACCCGCAC |
| 2247 | CCUGACAGG CGGACCCGCA |
| 2248 | CCCUGACAGGCGGACCCGC |
| 2249 | UCCCUGACAGGCGGACCCG |
| 2250 | UUCCCUGACAGGCGGACCC |
| 2251 | GUUCCCUGACAGGCGGACC |
| 2252 | GGUUCCCUGACAGGCGGAC |
| 2253 | CGGUUCCCUGACAGGCGGA |
| 2254 | UCGGUUCCCUGACAGGCGG |
| 2255 | CUCGGUUCCCUGACAGGCG |
| 2256 | CCUCGGUUCCCUGACAGGC |
| 2257 | CCCUCGGUUCCCUGACAGG |
| 2258 | CCCCUCGGUUCCCUGACAG |
| 2259 | ACCCCUCGGUUCCCUGACA |
| 2260 | GACCCCUCGGUUCCCUGAC |
| 2261 | GGACCCCUCGGUUCCCUGA |
| 2262 | UGGACCCCUCGGUUCCCUG |
| 2263 | GUGGACCCCUCGGUUCCCU |
| 2264 | GGUGGACCCCUCGGUUCCC |
| 2265 | CGGUGGACCCCUCGGUUCC |
| 2266 | UCGGUGGACCCCUCGGUUC |
| 2267 | GUCGGUGGACCCCUCGGUU |
| 2268 | GGUCGGUGGACCCCUCGGU |
| 2269 | AGGUCGGUGGACCCCUCGG |
| 2270 | GAGGUCGGUGGACCCCUCG |
| 2271 | GGAGGUCGGUGGACCCCUC |
| 2272 | GGGAGGUCGGUGGACCCCU |
| 2273 | CGGGAGGUCGGUGGACCCC |
| 2274 | ACGGGAGGUCGGUGGACCC |
| 2275 | AACGGGAGGUCGGUGGACC |
| 2276 | UAACGGGAGGUCGGUGGAC |
| 2277 | CUAACGGGAGGUCGGUGGA |
| 2278 | GCUAACGGGAGGUCGGUGG |
| 2279 | GGCUAACGGGAGGUCGGUG |
| 2280 | GGGCUAACGGGAGGUCGGU |
| 2281 | GGGGCUAACGGGAGGUCGG |
| 2282 | AGGGGCUAACGGGAGGUCG |
| 2283 | CAGGGGCUAACGGGAGGUC |
| 2284 | UCAGGGGCUAACGGGAGGU |
| 2285 | CUCAGGGGCUAACGGGAGG |
| 2286 | UCUCAGGGGCUAACGGGAG |
| 2287 | CUCUCAGGGGCUAACGGGA |
| 2288 | GCUCUCAGGGGCUAACGGG |
| 2289 | GGCUCUCAGGGGCUAACGG |
| 2290 | CGGCUCUCAGGGGCUAACG |
| 2291 | CCGGCUCUCAGGGGCUAAC |
| 2292 | CCCGGCUCUCAGGGGCUAA |
| 2293 | ACCCGGCUCUCAGGGGCUA |
| 2294 | CACCCGGCUCUCAGGGGCU |
| 2295 | CCACCCGGCUCUCAGGGGC |
| 2296 | UCCACCCGGCUCUCAGGGG |
| 2297 | GUCCACCCGGCUCUCAGGG |
| 2298 | GGUCCACCCGGCUCUCAGG |
| 2299 | GGGUCCACCCGGCUCUCAG |
| 2300 | AGGGUCCACCCGGCUCUCA |
| 2301 | CAGGGUCCACCCGGCUCUC |
| 2302 | UCAGGGUCCACCCGGCUCU |
| 2303 | CUCAGGGUCCACCCGGCUC |
| 2304 | CCUCAGGGUCCACCCGGCU |
| 2305 | ACCUCAGGGUCCACCCGGC |
| 2306 | GACCUCAGGGUCCACCCGG |
| 2307 | GGACCUCAGGGUCCACCCG |
| 2308 | AGGACCUCAGGGUCCACCC |
| 2309 | AAGGACCUCAGGGUCCACC |
| 2310 | GAAGGACCUCAGGGUCCAC |
| 2311 | UGAAGGACCUCAGGGUCCA |
| 2312 | GUGAAGGACCUCAGGGUCC |
| 2313 | UGUGAAGGACCUCAGGGUC |
| 2314 | CUGUGAAGGACCUCAGGGU |
| 2315 | GCUGUGAAGGACCUCAGGG |
| 2316 | GGCUGUGAAGGACCUCAGG |
| 2317 | AGGCUGUGAAGGACCUCAG |
| 2318 | CAGGCUGUGAAGGACCUCA |
| 2319 | GCAGGCUGUGAAGGACCUC |
| 2320 | UGCAGGCUGUGAAGGACCU |
| 2321 | CUGCAGGCUGUGAAGGACC |
| 2322 | UCUGCAGGCUGUGAAGGAC |
| 2323 | GUCUGCAGGCUGUGAAGGA |
| 2324 | UGUCUGCAGGCUGUGAAGG |
| 2325 | GUGUCUGCAGGCUGUGAAG |
| 2326 | UGUGUCUGCAGGCUGUGAA |
| 2327 | UUGUGUCUGCAGGCUGUGA |
| 2328 | GUUGUGUCUGCAGGCUGUG |
| 2329 | AGUUGUGUCUGCAGGCUGU |
| 2330 | GAGUUGUGUCUGCAGGCUG |
| 2331 | UGAGUUGUGUCUGCAGGCU |
| 2332 | UUGAGUUGUGUCUGCAGGC |
| 2333 | CUUGAGUUGUGUCUGCAGG |
| 2334 | CCUUGAGUUGUGUCUGCAG |
| 2335 | GCCUUGAGUUGUGUCUGCA |
| 2336 | AGCCUUGAGUUGUGUCUGC |
| 2337 | GAGCCUUGAGUUGUGUCUG |
| 2338 | UGAGCCUUGAGUUGUGUCU |
| 2339 | CUGAGCCUUGAGUUGUGUC |
| 2340 | UCUGAGCCUUGAGUUGUGU |
| 2341 | UUCUGAGCCUUGAGUUGUG |
| 2342 | GUUCUGAGCCUUGAGUUGU |
| 2343 | UGUUCUGAGCCUUGAGUUG |
| 2344 | CUGUUCUGAGCCUUGAGUU |
| 2345 | GCUGUUCUGAGCCUUGAGU |
| 2346 | UGCUGUUCUGAGCCUUGAG |
| 2347 | CUGCUGUUCUGAGCCUUGA |
| 2348 | CCUGCUGUUCUGAGCCUUG |
| 2349 | UCCUGCUGUUCUGAGCCUU |
| 2350 | AUCCUGCUGUUCUGAGCCU |
| 2351 | GAUCCUGCUGUUCUGAGCC |
| 2352 | GGAUCCUGCUGUUCUGAGC |
| 2353 | UGGAUCCUGCUGUUCUGAG |
| 2354 | CUGGAUCCUGCUGUUCUGA |
| 2355 | GCUGGAUCCUGCUGUUCUG |
| 2356 | UGCUGGAUCCUGCUGUUCU |
| 2357 | UUGCUGGAUCCUGCUGUUC |
| 2358 | GUUGCUGGAUCCUGCUGUU |
| 2359 | AGUUGCUGGAUCCUGCUGU |
| 2360 | GAGUUGCUGGAUCCUGCUG |
| 2361 | AGAGUUGCUGGAUCCUGCU |
| 2362 | AAGAGUUGCUGGAUCCUGC |
| 2363 | GAAGAGUUGCUGGAUCCUG |
| 2364 | GGAAGAGUUGCUGGAUCCU |
| 2365 | UGGAAGAGUUGCUGGAUCC |
| 2366 | GUGGAAGAGUUGCUGGAUC |
| 2367 | UGUGGAAGAGUUGCUGGAU |
| 2368 | UUGUGGAAGAGUUGCUGGA |
| 2369 | CUUGUGGAAGAGUUGCUGG |
| 2370 | CCUUGUGGAAGAGUUGCUG |
| 2371 | ACCUUGUGGAAGAGUUGCU |
| 2372 | CACCUUGUGGAAGAGUUGC |
| 2373 | CCACCUUGUGGAAGAGUUG |
| 2374 | GCCACCUUGUGGAAGAGUU |
| 2375 | GGCCACCUUGUGGAAGAGU |
| 2376 | GGGCCACCUUGUGGAAGAG |
| 2377 | UGGGCCACCUUGUGGAAGA |
| 2378 | CUGGGCCACCUUGUGGAAG |
| 2379 | GCUGGGCCACCUUGUGGAA |
| 2380 | UGCUGGGCCACCUUGUGGA |
| 2381 | CUGCUGGGCCACCUUGUGG |
| 2382 | GCUGCUGGGCCACCUUGUG |
| 2383 | UGCUGCUGGGCCACCUUGU |
| 2384 | CUGCUGCUGGGCCACCUUG |
| 2385 | GCUGCUGCUGGGCCACCUU |
| 2386 | CGCUGCUGCUGGGCCACCU |
| 2387 | CCGCUGCUGCUGGGCCACC |
| 2388 | GCCGCUGCUGCUGGGCCAC |
| 2389 | UGCCGCUGCUGCUGGGCCA |
| 2390 | GUGCCGCUGCUGCUGGGCC |
| 2391 | GGUGCCGCUGCUGCUGGGC |
| 2392 | AGGUGCCGCUGCUGCUGGG |
| 2393 | CAGGUGCCGCUGCUGCUGG |
| 2394 | CCAGGUGCCGCUGCUGCUG |
| 2395 | UCCAGGUGCCGCUGCUGCU |
| 2396 | CUCCAGGUGCCGCUGCUGC |
| 2397 | UCUCCAGGUGCCGCUGCUG |
| 2398 | UUCUCCAGGUGCCGCUGCU |
| 2399 | CUUCUCCAGGUGCCGCUGC |
| 2400 | GCUUCUCCAGGUGCCGCUG |
| 2401 | UGCUUCUCCAGGUGCCGCU |
| 2402 | CUGCUUCUCCAGGUGCCGC |
| 2403 | GCUGCUUCUCCAGGUGCCG |
| 2404 | UGCUGCUUCUCCAGGUGCC |
| 2405 | GUGCUGCUUCUCCAGGUGC |
| 2406 | GGUGCUGCUUCUCCAGGUG |
| 2407 | AGGUGCUGCUUCUCCAGGU |
| 2408 | CAGGUGCUGCUUCUCCAGG |
| 2409 | GCAGGUGCUGCUUCUCCAG |
| 2410 | CGCAGGUGCUGCUUCUCCA |
| 2411 | UCGCAGGUGCUGCUUCUCC |
| 2412 | UUCGCAGGUGCUGCUUCUC |
| 2413 | AUUCGCAGGUGCUGCUUCU |
| 2414 | AAUUCGCAGGUGCUGCUUC |
| 2415 | GAAUUCGCAGGUGCUGCUU |
| 2416 | UGAAUUCGCAGGUGCUGCU |
| 2417 | CUGAAUUCGCAGGUGCUGC |
| 2418 | GCUGAAUUCGCAGGUGCUG |
| 2419 | UGCUGAAUUCGCAGGUGCU |
| 2420 | AUGCUGAAUUCGCAGGUGC |
| 2421 | GAUGCUGAAUUCGCAGGUG |
| 2422 | AGAUGCUGAAUUCGCAGGU |
| 2423 | CAGAUGCUGAAUUCGCAGG |
| 2424 | GCAGAUGCUGAAUUCGCAG |
| 2425 | UGCAGAUGCUGAAUUCGCA |
| 2426 | UUGCAGAUGCUGAAUUCGC |
| 2427 | UUUGCAGAUGCUGAAUUCG |
| 2428 | CUUUGCAGAUGCUGAAUUC |
| 2429 | GCUUUGCAGAUGCUGAAUU |
| 2430 | GGCUUUGCAGAUGCUGAAU |
| 2431 | UGGCUUUGCAGAUGCUGAA |
| 2432 | CUGGCUUUGCAGAUGCUGA |
| 2433 | ACUGGCUUUGCAGAUGCUG |
| 2434 | AACUGGCUUUGCAGAUGCU |
| 2435 | AAACUGGCUUUGCAGAUGC |
| 2436 | CAAACUGGCUUUGCAGAUG |
| 2437 | CCAAACUGGCUUUGCAGAU |
| 2438 | GCCAAACUGGCUUUGCAGA |
| 2439 | GGCCAAACUGGCUUUGCAG |
| 2440 | AGGCCAAACUGGCUUUGCA |
| 2441 | GAGGCCAAACUGGCUUUGC |
| 2442 | GGAGGCCAAACUGGCUUUG |
| 2443 | AGGAGGCCAAACUGGCUUU |
| 2444 | CAGGAGGCCAAACUGGCUU |
| 2445 | CCAGGAGGCCAAACUGGCU |
| 2446 | UCCAGGAGGCCAAACUGGC |
| 2447 | GUCCAGGAGGCCAAACUGG |
| 2448 | GGUCCAGGAGGCCAAACUG |
| 2449 | UGGUCCAGGAGGCCAAACU |
| 2450 | GUGGUCCAGGAGGCCAAAC |
| 2451 | UGUGGUCCAGGAGGCCAAA |
| 2452 | UUGUGGUCCAGGAGGCCAA |
| 2453 | CUUGUGGUCCAGGAGGCCA |
| 2454 | GCUUGUGGUCCAGGAGGCC |
| 2455 | UGCUUGUGGUCCAGGAGGC |
| 2456 | GUGCUUGUGGUCCAGGAGG |
| 2457 | GGUGCUUGUGGUCCAGGAG |
| 2458 | AGGUGCUUGUGGUCCAGGA |
| 2459 | UAGGUGCUUGUGGUCCAGG |
| 2460 | CUAGGUGCUUGUGGUCCAG |
| 2461 | UCUAGGUGCUUGUGGUCCA |
| 2462 | GUCUAGGUGCUUGUGGUCC |
| 2463 | GGUCUAGGUGCUUGUGGUC |
| 2464 | UGGUCUAGGUGCUUGUGGU |
| 2465 | AUGGUCUAGGUGCUUGUGG |
| 2466 | CAUGGUCUAGGUGCUUGUG |
| 2467 | UCAUGGUCUAGGUGCUUGU |
| 2468 | CUCAUGGUCUAGGUGCUUG |
| 2469 | CCUCAUGGUCUAGGUGCUU |
| 2470 | ACCUCAUGGUCUAGGUGCU |
| 2471 | CACCUCAUGGUCUAGGUGC |
| 2472 | CCACCUCAUGGUCUAGGUG |
| 2473 | GCCACCUCAUGGUCUAGGU |
| 2474 | GGCCACCUCAUGGUCUAGG |
| 2475 | UGGCCACCUCAUGGUCUAG |
| 2476 | UUGGCCACCUCAUGGUCUA |
| 2477 | CUUGGCCACCUCAUGGUCU |
| 2478 | GCUUGGCCACCUCAUGGUC |
| 2479 | GGCUUGGCCACCUCAUGGU |
| 2480 | AGGCUUGGCCACCUCAUGG |
| 2481 | CAGGCUUGGCCACCUCAUG |
| 2482 | GCAGGCUUGGCCACCUCAU |
| 2483 | GGCAGGCUUGGCCACCUCA |
| 2484 | GGGCAGGCUUGGCCACCUC |
| 2485 | CGGGCAGGCUUGGCCACCU |
| 2486 | UCGGGCAGGCUUGGCCACC |
| 2487 | UUCGGGCAGGCUUGGCCAC |
| 2488 | CUUCGGGCAGGCUUGGCCA |
| 2489 | UCUUCGGGCAGGCUUGGCC |
| 2490 | UUCUUCGGGCAGGCUUGGC |
| 2491 | UUUCUUCGGGCAGGCUUGG |
| 2492 | CUUUCUUCGGGCAGGCUUG |
| 2493 | UCUUUCUUCGGGCAGGCUU |
| 2494 | CUCUUUCUUCGGGCAGGCU |
| 2495 | CCUCUUUCUUCGGGCAGGC |
| 2496 | GCCUCUUUCUUCGGGCAGG |
| 2497 | AGCCUCUUUCUUCGGGCAG |
| 2498 | CAGCCUCUUUCUUCGGGCA |
| 2499 | GCAGCCUCUUUCUUCGGGC |
| 2500 | GGCAGCCUCUUUCUUCGGG |
| 2501 | GGGCAGCCUCUUUCUUCGG |
| 2502 | CGGGCAGCCUCUUUCUUCG |
| 2503 | UCGGGCAGCCUCUUUCUUC |
| 2504 | CUCGGGCAGCCUCUUUCUU |
| 2505 | UCUCGGGCAGCCUCUUUCU |
| 2506 | AUCUCGGGCAGCCUCUUUC |
| 2507 | CAUCUCGGGCAGCCUCUUU |
| 2508 | CCAUCUCGGGCAGCCUCUU |
| 2509 | GCCAUCUCGGGCAGCCUCU |
| 2510 | GGCCAUCUCGGGCAGCCUC |
| 2511 | GGGCCAUCUCGGGCAGCCU |
| 2512 | UGGGCCAUCUCGGGCAGCC |
| 2513 | CUGGGCCAUCUCGGGCAGC |
| 2514 | GCUGGGCCAUCUCGGGCAG |
| 2515 | GGCUGGGCCAUCUCGGGCA |
| 2516 | UGGCUGGGCCAUCUCGGGC |
| 2517 | CUGGCUGGGCCAUCUCGGG |
| 2518 | ACUGGCUGGGCCAUCUCGG |
| 2519 | AACUGGCUGGGCCAUCUCG |
| 2520 | CAACUGGCUGGGCCAUCUC |
| 2521 | UCAACUGGCUGGGCCAUCU |
| 2522 | GUCAACUGGCUGGGCCAUC |
| 2523 | GGUCAACUGGCUGGGCCAU |
| 2524 | GGGUCAACUGGCUGGGCCA |
| 2525 | CGGGUCAACUGGCUGGGCC |
| 2526 | CCGGGUCAACUGGCUGGGC |
| 2527 | GCCGGGUCAACUGGCUGGG |
| 2528 | AGCCGGGUCAACUGGCUGG |
| 2529 | GAGCCGGGUCAACUGGCUG |
| 2530 | UGAGCCGGGUCAACUGGCU |
| 2531 | GUGAGCCGGGUCAACUGGC |
| 2532 | UGUGAGCCGGGUCAACUGG |
| 2533 | UUGUGAGCCGGGUCAACUG |
| 2534 | AUUGUGAGCCGGGUCAACU |
| 2535 | CAUUGUGAGCCGGGUCAAC |
| 2536 | ACAUUGUGAGCCGGGUCAA |
| 2537 | GACAUUGUGAGCCGGGUCA |
| 2538 | UGACAUUGUGAGCCGGGUC |
| 2539 | CUGACAUUGUGAGCCGGGU |
| 2540 | GCUGACAUUGUGAGCCGGG |
| 2541 | GGCUGACAUUGUGAGCCGG |
| 2542 | CGGCUGACAUUGUGAGCCG |
| 2543 | GCGGCUGACAUUGUGAGCC |
| 2544 | GGCGGCUGACAUUGUGAGC |
| 2545 | AGGCGGCUGACAUUGUGAG |
| 2546 | CAGGCGGCUGACAUUGUGA |
| 2547 | GCAGGCGGCUGACAUUGUG |
| 2548 | UGCAGGCGGCUGACAUUGU |
| 2549 | GUGCAGGCGGCUGACAUUG |
| 2550 | GGUGCAGGCGGCUGACAUU |
| 2551 | CGGUGCAGGCGGCUGACAU |
| 2552 | CCGGUGCAGGCGGCUGACA |
| 2553 | GCCGGUGCAGGCGGCUGAC |
| 2554 | AGCCGGUGCAGGCGGCUGA |
| 2555 | CAGCCGGUGCAGGCGGCUG |
| 2556 | GCAGCCGGUGCAGGCGGCU |
| 2557 | GGCAGCCGGUGCAGGCGGC |
| 2558 | GGGCAGCCGGUGCAGGCGG |
| 2559 | UGGGCAGCCGGUGCAGGCG |
| 2560 | CUGGGCAGCCGGUGCAGGC |
| 2561 | CCUGGGCAGCCGGUGCAGG |
| 2562 | CCCUGGGCAGCCGGUGCAG |
| 2563 | UCCCUGGGCAGCCGGUGCA |
| 2564 | AUCCCUGGGCAGCCGGUGC |
| 2565 | AAUCCCUGGGCAGCCGGUG |
| 2566 | CAAUCCCUGGGCAGCCGGU |
| 2567 | GCAAUCCCUGGGCAGCCGG |
| 2568 | GGCAAUCCCUGGGCAGCCG |
| 2569 | UGGCAAUCCCUGGGCAGCC |
| 2570 | CUGGCAAUCCCUGGGCAGC |
| 2571 | CCUGGCAAUCCCUGGGCAG |
| 2572 | UCCUGGCAAUCCCUGGGCA |
| 2573 | CUCCUGGCAAUCCCUGGGC |
| 2574 | GCUCCUGGCAAUCCCUGGG |
| 2575 | AGCUCCUGGCAAUCCCUGG |
| 2576 | CAGCUCCUGGCAAUCCCUG |
| 2577 | ACAGCUCCUGGCAAUCCCU |
| 2578 | AACAGCUCCUGGCAAUCCC |
| 2579 | GAACAGCUCCUGGCAAUCC |
| 2580 | GGAACAGCUCCUGGCAAUC |
| 2581 | UGGAACAGCUCCUGGCAAU |
| 2582 | CUGGAACAGCUCCUGGCAA |
| 2583 | CCUGGAACAGCUCCUGGCA |
| 2584 | ACCUGGAACAGCUCCUGGC |
| 2585 | AACCUGGAACAGCUCCUGG |
| 2586 | CAACCUGGAACAGCUCCUG |
| 2587 | CCAACCUGGAACAGCUCCU |
| 2588 | CCCAACCUGGAACAGCUCC |
| 2589 | CCCCAACCUGGAACAGCUC |
| 2590 | UCCCCAACCUGGAACAGCU |
| 2591 | CUCCCCAACCUGGAACAGC |
| 2592 | UCUCCCCAACCUGGAACAG |
| 2593 | CUCUCCCCAACCUGGAACA |
| 2594 | CCUCUCCCCAACCUGGAAC |
| 2595 | GCCUCUCCCCAACCUGGAA |
| 2596 | UGCCUCUCCCCAACCUGGA |
| 2597 | CUGCCUCUCCCCAACCUGG |
| 2598 | UCUGCCUCUCCCCAACCUG |
| 2599 | CUCUGCCUCUCCCCAACCU |
| 2600 | ACUCUGCCUCUCCCCAACC |
| 2601 | CACUCUGCCUCUCCCCAAC |
| 2602 | CCACUCUGCCUCUCCCCAA |
| 2603 | UCCACUCUGCCUCUCCCCA |
| 2604 | GUCCACUCUGCCUCUCCCC |
| 2605 | AGUCCACUCUGCCUCUCCC |
| 2606 | UAGUCCACUCUGCCUCUCC |
| 2607 | AUAGUCCACUCUGCCUCUC |
| 2608 | AAUAGUCCACUCUGCCUCU |
| 2609 | AAAUAGUCCACUCUGCCUC |
| 2610 | CAAAUAGUCCACUCUGCCU |
| 2611 | UCAAAUAGUCCACUCUGCC |
| 2612 | UUCAAAUAGUCCACUCUGC |
| 2613 | UUUCAAAUAGUCCACUCUG |
| 2614 | AUUUCAAAUAGUCCACUCU |
| 2615 | GAUUUCAAAUAGUCCACUC |
| 2616 | GGAUUUCAAAUAGUCCACU |
| 2617 | UGGAUUUCAAAUAGUCCAC |
| 2618 | CUGGAUUUCAAAUAGUCCA |
| 2619 | GCUGGAUUUCAAAUAGUCC |
| 2620 | GGCUGGAUUUCAAAUAGUC |
| 2621 | AGGCUGGAUUUCAAAUAGU |
| 2622 | GAGGCUGGAUUUCAAAUAG |
| 2623 | UGAGGCUGGAUUUCAAAUA |
| 2624 | CUGAGGCUGGAUUUCAAAU |
| 2625 | CCUGAGGCUGGAUUUCAAA |
| 2626 | CCCUGAGGCUGGAUUUCAA |
| 2627 | CCCCUGAGGCUGGAUUUCA |
| 2628 | ACCCCUGAGGCUGGAUUUC |
| 2629 | GACCCCUGAGGCUGGAUUU |
| 2630 | AGACCCCUGAGGCUGGAUU |
| 2631 | GAGACCCCUGAGGCUGGAU |
| 2632 | GGAGACCCCUGAGGCUGGA |
| 2633 | CGGAGACCCCUGAGGCUGG |
| 2634 | GCGGAGACCCCUGAGGCUG |
| 2635 | GGCGGAGACCCCUGAGGCU |
| 2636 | UGGCGGAGACCCCUGAGGC |
| 2637 | AUGGCGGAGACCCCUGAGG |
| 2638 | AAUGGCGGAGACCCCUGAG |
| 2639 | AAAUGGCGGAGACCCCUGA |
| 2640 | AAAAUGGCGGAGACCCCUG |
| 2641 | AAAAAUGGCGGAGACCCCU |
| 2642 | CAAAAAUGGCGGAGACCCC |
| 2643 | CCAAAAAUGGCGGAGACCC |
| 2644 | ACCAAAAAUGGCGGAGACC |
| 2645 | CACCAAAAAUGGCGGAGAC |
| 2646 | UCACCAAAAAUGGCGGAGA |
| 2647 | UUCACCAAAAAUGGCGGAG |
| 2648 | GUUCACCAAAAAUGGCGGA |
| 2649 | AGUUCACCAAAAAUGGCGG |
| 2650 | CAGUUCACCAAAAAUGGCG |
| 2651 | GCAGUUCACCAAAAAUGGC |
| 2652 | UGCAGUUCACCAAAAAUGG |
| 2653 | UUGCAGUUCACCAAAAAUG |
| 2654 | CUUGCAGUUCACCAAAAAU |
| 2655 | UCUUGCAGUUCACCAAAAA |
| 2656 | AUCUUGCAGUUCACCAAAA |
| 2657 | CAUCUUGCAGUUCACCAAA |
| 2658 | UCAUCUUGCAGUUCACCAA |
| 2659 | GUCAUCUUGCAGUUCACCA |
| 2660 | GGUCAUCUUGCAGUUCACC |
| 2661 | AGGUCAUCUUGCAGUUCAC |
| 2662 | GAGGUCAUCUUGCAGUUCA |
| 2663 | UGAGGUCAUCUUGCAGUUC |
| 2664 | CUGAGGUCAUCUUGCAGUU |
| 2665 | UCUGAGGUCAUCUUGCAGU |
| 2666 | AUCUGAGGUCAUCUUGCAG |
| 2667 | CAUCUGAGGUCAUCUUGCA |
| 2668 | CCAUCUGAGGUCAUCUUGC |
| 2669 | UCCAUCUGAGGUCAUCUUG |
| 2670 | CUCCAUCUGAGGUCAUCUU |
| 2671 | CCUCCAUCUGAGGUCAUCU |
| 2672 | GCCUCCAUCUGAGGUCAUC |
| 2673 | AGCCUCCAUCUGAGGUCAU |
| 2674 | CAGCCUCCAUCUGAGGUCA |
| 2675 | CCAGCCUCCAUCUGAGGUC |
| 2676 | UCCAGCCUCCAUCUGAGGU |
| 2677 | GUCCAGCCUCCAUCUGAGG |
| 2678 | UGUCCAGCCUCCAUCUGAG |
| 2679 | CUGUCCAGCCUCCAUCUGA |
| 2680 | ACUGUCCAGCCUCCAUCUG |
| 2681 | UACUGUCCAGCCUCCAUCU |
| 2682 | UUACUGUCCAGCCUCCAUC |
| 2683 | AUUACUGUCCAGCCUCCAU |
| 2684 | AAUUACUGUCCAGCCUCCA |
| 2685 | GAAUUACUGUCCAGCCUCC |
| 2686 | UGAAUUACUGUCCAGCCUC |
| 2687 | CUGAAUUACUGUCCAGCCU |
| 2688 | UCUGAAUUACUGUCCAGCC |
| 2689 | CUCUGAAUUACUGUCCAGC |
| 2690 | CCUCUGAAUUACUGUCCAG |
| 2691 | GCCUCUGAAUUACUGUCCA |
| 2692 | CGCCUCUGAAUUACUGUCC |
| 2693 | GCGCCUCUGAAUUACUGUC |
| 2694 | GGCGCCUCUGAAUUACUGU |
| 2695 | UGGCGCCUCUGAAUUACUG |
| 2696 | GUGGCGCCUCUGAAUUACU |
| 2697 | CGUGGCGCCUCUGAAUUAC |
| 2698 | UCGUGGCGCCUCUGAAUUA |
| 2699 | AUCGUGGCGCCUCUGAAUU |
| 2700 | CAUCGUGGCGCCUCUGAAU |
| 2701 | CCAUCGUGGCGCCUCUGAA |
| 2702 | GCCAUCGUGGCGCCUCUGA |
| 2703 | AGCCAUCGUGGCGCCUCUG |
| 2704 | GAGCCAUCGUGGCGCCUCU |
| 2705 | UGAGCCAUCGUGGCGCCUC |
| 2706 | CUGAGCCAUCGUGGCGCCU |
| 2707 | ACUGAGCCAUCGUGGCGCC |
| 2708 | CACUGAGCCAUCGUGGCGC |
| 2709 | CCACUGAGCCAUCGUGGCG |
| 2710 | UCCACUGAGCCAUCGUGGC |
| 2711 | GUCCACUGAGCCAUCGUGG |
| 2712 | AGUCCACUGAGCCAUCGUG |
| 2713 | AAGUCCACUGAGCCAUCGU |
| 2714 | GAAGUCCACUGAGCCAUCG |
| 2715 | UGAAGUCCACUGAGCCAUC |
| 2716 | UUGAAGUCCACUGAGCCAU |
| 2717 | GUUGAAGUCCACUGAGCCA |
| 2718 | GGUUGAAGUCCACUGAGCC |
| 2719 | CGGUUGAAGUCCACUGAGC |
| 2720 | CCGGUUGAAGUCCACUGAG |
| 2721 | GCCGGUUGAAGUCCACUGA |
| 2722 | GGCCGGUUGAAGUCCACUG |
| 2723 | GGGCCGGUUGAAGUCCACU |
| 2724 | AGGGCCGGUUGAAGUCCAC |
| 2725 | CAGGGCCGGUUGAAGUCCA |
| 2726 | CCAGGGCCGGUUGAAGUCC |
| 2727 | CCCAGGGCCGGUUGAAGUC |
| 2728 | UCCCAGGGCCGGUUGAAGU |
| 2729 | UUCCCAGGGCCGGUUGAAG |
| 2730 | CUUCCCAGGGCCGGUUGAA |
| 2731 | GCUUCCCAGGGCCGGUUGA |
| 2732 | GGCUUCCCAGGGCCGGUUG |
| 2733 | AGGCUUCCCAGGGCCGGUU |
| 2734 | UAGGCUUCCCAGGGCCGGU |
| 2735 | GUAGGCUUCCCAGGGCCGG |
| 2736 | UGUAGGCUUCCCAGGGCCG |
| 2737 | UUGUAGGCUUCCCAGGGCC |
| 2738 | CUUGUAGGCUUCCCAGGGC |
| 2739 | CCUUGUAGGCUUCCCAGGG |
| 2740 | GCCUUGUAGGCUUCCCAGG |
| 2741 | CGCCUUGUAGGCUUCCCAG |
| 2742 | CCGCCUUGUAGGCUUCCCA |
| 2743 | CCCGCCUUGUAGGCUUCCC |
| 2744 | CCCCGCCUUGUAGGCUUCC |
| 2745 | ACCCCGCCUUGUAGGCUUC |
| 2746 | AACCCCGCCUUGUAGGCUU |
| 2747 | AAACCCCGCCUUGUAGGCU |
| 2748 | CAAACCCCGCCUUGUAGGC |
| 2749 | CCAAACCCCGCCUUGUAGG |
| 2750 | CCCAAACCCCGCCUUGUAG |
| 2751 | CCCCAAACCCCGCCUUGUA |
| 2752 | UCCCCAAACCCCGCCUUGU |
| 2753 | AUCCCCAAACCCCGCCUUG |
| 2754 | GAUCCCCAAACCCCGCCUU |
| 2755 | GGAUCCCCAAACCCCGCCU |
| 2756 | GGGAUCCCCAAACCCCGCC |
| 2757 | GGGGAUCCCCAAACCCCGC |
| 2758 | UGGGGAUCCCCAAACCCCG |
| 2759 | GUGGGGAUCCCCAAACCCC |
| 2760 | CGUGGGGAUCCCCAAACCC |
| 2761 | CCGUGGGGAUCCCCAAACC |
| 2762 | GCCGUGGGGAUCCCCAAAC |
| 2763 | CGCCGUGGGGAUCCCCAAA |
| 2764 | UCGCCGUGGGGAUCCCCAA |
| 2765 | CUCGCCGUGGGGAUCCCCA |
| 2766 | ACUCGCCGUGGGGAUCCCC |
| 2767 | AACUCGCCGUGGGGAUCCC |
| 2768 | GAACUCGCCGUGGGGAUCC |
| 2769 | AGAACUCGCCGUGGGGAUC |
| 2770 | CAGAACUCGCCGUGGGGAU |
| 2771 | CCAGAACUCGCCGUGGGGA |
| 2772 | GCCAGAACUCGCCGUGGGG |
| 2773 | AGCCAGAACUCGCCGUGGG |
| 2774 | CAGCCAGAACUCGCCGUGG |
| 2775 | CCAGCCAGAACUCGCCGUG |
| 2776 | CCCAGCCAGAACUCGCCGU |
| 2777 | ACCCAGCCAGAACUCGCCG |
| 2778 | GACCCAGCCAGAACUCGCC |
| 2779 | AGACCCAGCCAGAACUCGC |
| 2780 | CAGACCCAGCCAGAACUCG |
| 2781 | CCAGACCCAGCCAGAACUC |
| 2782 | UCCAGACCCAGCCAGAACU |
| 2783 | CUCCAGACCCAGCCAGAAC |
| 2784 | UCUCCAGACCCAGCCAGAA |
| 2785 | UUCUCCAGACCCAGCCAGA |
| 2786 | CUUCUCCAGACCCAGCCAG |
| 2787 | CCUUCUCCAGACCCAGCCA |
| 2788 | ACCUUCUCCAGACCCAGCC |
| 2789 | CACCUUCUCCAGACCCAGC |
| 2790 | GCACCUUCUCCAGACCCAG |
| 2791 | UGCACCUUCUCCAGACCCA |
| 2792 | AUGCACCUUCUCCAGACCC |
| 2793 | UAUGCACCUUCUCCAGACC |
| 2794 | CUAUGCACCUUCUCCAGAC |
| 2795 | GCUAUGCACCUUCUCCAGA |
| 2796 | UGCUAUGCACCUUCUCCAG |
| 2797 | AUGCUAUGCACCUUCUCCA |
| 2798 | GAUGCUAUGCACCUUCUCC |
| 2799 | UGAUGCUAUGCACCUUCUC |
| 2800 | GUGAUGCUAUGCACCUUCU |
| 2801 | CGUGAUGCUAUGCACCUUC |
| 2802 | CCGUGAUGCUAUGCACCUU |
| 2803 | CCCGUGAUGCUAUGCACCU |
| 2804 | CCCCGUGAUGCUAUGCACC |
| 2805 | CCCCCGUGAUGCUAUGCAC |
| 2806 | UCCCCCGUGAUGCUAUGCA |
| 2807 | GUCCCCCGUGAUGCUAUGC |
| 2808 | GGUCCCCCGUGAUGCUAUG |
| 2809 | CGGUCCCCCGUGAUGCUAU |
| 2810 | GCGGUCCCCCGUGAUGCUA |
| 2811 | UGCGGUCCCCCGUGAUGCU |
| 2812 | UUGCGGUCCCCCGUGAUGC |
| 2813 | GUUGCGGUCCCCCGUGAUG |
| 2814 | UGUUGCGGUCCCCCGUGAU |
| 2815 | CUGUUGCGGUCCCCCGUGA |
| 2816 | GCUGUUGCGGUCCCCCGUG |
| 2817 | GGCUGUUGCGGUCCCCCGU |
| 2818 | CGGCUGUUGCGGUCCCCCG |
| 2819 | GCGGCUGUUGCGGUCCCCC |
| 2820 | GGCGGCUGUUGCGGUCCCC |
| 2821 | AGGCGGCUGUUGCGGUCCC |
| 2822 | CAGGCGGCUGUUGCGGUCC |
| 2823 | CCAGGCGGCUGUUGCGGUC |
| 2824 | GCCAGGCGGCUGUUGCGGU |
| 2825 | GGCCAGGCGGCUGUUGCGG |
| 2826 | CGGCCAGGCGGCUGUUGCG |
| 2827 | ACGGCCAGGCGGCUGUUGC |
| 2828 | CACGGCCAGGCGGCUGUUG |
| 2829 | GCACGGCCAGGCGGCUGUU |
| 2830 | UGCACGGCCAGGCGGCUGU |
| 2831 | CUGCACGGCCAGGCGGCUG |
| 2832 | GCUGCACGGCCAGGCGGCU |
| 2833 | AGCUGCACGGCCAGGCGGC |
| 2834 | CAGCUGCACGGCCAGGCGG |
| 2835 | GCAGCUGCACGGCCAGGCG |
| 2836 | CGCAGCUGCACGGCCAGGC |
| 2837 | CCGCAGCUGCACGGCCAGG |
| 2838 | CCCGCAGCUGCACGGCCAG |
| 2839 | UCCCGCAGCUGCACGGCCA |
| 2840 | GUCCCGCAGCUGCACGGCC |
| 2841 | AGUCCCGCAGCUGCACGGC |
| 2842 | CAGUCCCGCAGCUGCACGG |
| 2843 | CCAGUCCCGCAGCUGCACG |
| 2844 | CCCAGUCCCGCAGCUGCAC |
| 2845 | UCCCAGUCCCGCAGCUGCA |
| 2846 | AUCCCAGUCCCGCAGCUGC |
| 2847 | CAUCCCAGUCCCGCAGCUG |
| 2848 | CCAUCCCAGUCCCGCAGCU |
| 2849 | GCCAUCCCAGUCCCGCAGC |
| 2850 | UGCCAUCCCAGUCCCGCAG |
| 2851 | UUGCCAUCCCAGUCCCGCA |
| 2852 | GUUGCCAUCCCAGUCCCGC |
| 2853 | CGUUGCCAUCCCAGUCCCG |
| 2854 | GCGUUGCCAUCCCAGUCCC |
| 2855 | GGCGUUGCCAUCCCAGUCC |
| 2856 | CGGCGUUGCCAUCCCAGUC |
| 2857 | UCGGCGUUGCCAUCCCAGU |
| 2858 | CUCGGCGUUGCCAUCCCAG |
| 2859 | ACUCGGCGUUGCCAUCCCA |
| 2860 | AACUCGGCGUUGCCAUCCC |
| 2861 | CAACUCGGCGUUGCCAUCC |
| 2862 | GCAACUCGGCGUUGCCAUC |
| 2863 | AGCAACUCGGCGUUGCCAU |
| 2864 | CAGCAACUCGGCGUUGCCA |
| 2865 | GCAGCAACUCGGCGUUGCC |
| 2866 | UGCAGCAACUCGGCGUUGC |
| 2867 | CUGCAGCAACUCGGCGUUG |
| 2868 | ACUGCAGCAACUCGGCGUU |
| 2869 | AACUGCAGCAACUCGGCGU |
| 2870 | GAACUGCAGCAACUCGGCG |
| 2871 | AGAACUGCAGCAACUCGGC |
| 2872 | GAGAACUGCAGCAACUCGG |
| 2873 | GGAGAACUGCAGCAACUCG |
| 2874 | CGGAGAACUGCAGCAACUC |
| 2875 | ACGGAGAACUGCAGCAACU |
| 2876 | CACGGAGAACUGCAGCAAC |
| 2877 | GCACGGAGAACUGCAGCAA |
| 2878 | UGCACGGAGAACUGCAGCA |
| 2879 | GUGCACGGAGAACUGCAGC |
| 2880 | GGUGCACGGAGAACUGCAG |
| 2881 | AGGUGCACGGAGAACUGCA |
| 2882 | CAGGUGCACGGAGAACUGC |
| 2883 | CCAGGUGCACGGAGAACUG |
| 2884 | CCCAGGUGCACGGAGAACU |
| 2885 | ACCCAGGUGCACGGAGAAC |
| 2886 | CACCCAGGUGCACGGAGAA |
| 2887 | CCACCCAGGUGCACGGAGA |
| 2888 | GCCACCCAGGUGCACGGAG |
| 2889 | CGCCACCCAGGUGCACGGA |
| 2890 | UCGCCACCCAGGUGCACGG |
| 2891 | CUCGCCACCCAGGUGCACG |
| 2892 | CCUCGCCACCCAGGUGCAC |
| 2893 | UCCUCGCCACCCAGGUGCA |
| 2894 | GUCCUCGCCACCCAGGUGC |
| 2895 | UGUCCUCGCCACCCAGGUG |
| 2896 | GUGUCCUCGCCACCCAGGU |
| 2897 | CGUGUCCUCGCCACCCAGG |
| 2898 | CCGUGUCCUCGCCACCCAG |
| 2899 | GCCGUGUCCUCGCCACCCA |
| 2900 | GGCCGUGUCCUCGCCACCC |
| 2901 | AGGCCGUGUCCUCGCCACC |
| 2902 | UAGGCCGUGUCCUCGCCAC |
| 2903 | AUAGGCCGUGUCCUCGCCA |
| 2904 | UAUAGGCCGUGUCCUCGCC |
| 2905 | CUAUAGGCCGUGUCCUCGC |
| 2906 | GCUAUAGGCCGUGUCCUCG |
| 2907 | GGCUAUAGGCCGUGUCCUC |
| 2908 | AGGCUAUAGGCCGUGUCCU |
| 2909 | CAGGCUAUAGGCCGUGUCC |
| 2910 | GCAGGCUAUAGGCCGUGUC |
| 2911 | UGCAGGCUAUAGGCCGUGU |
| 2912 | CUGCAGGCUAUAGGCCGUG |
| 2913 | GCUGCAGGCUAUAGGCCGU |
| 2914 | AGCUGCAGGCUAUAGGCCG |
| 2915 | GAGCUGCAGGCUAUAGGCC |
| 2916 | UGAGCUGCAGGCUAUAGGC |
| 2917 | GUGAGCUGCAGGCUAUAGG |
| 2918 | AGUGAGCUGCAGGCUAUAG |
| 2919 | CAGUGAGCUGCAGGCUAUA |
| 2920 | GCAGUGAGCUGCAGGCUAU |
| 2921 | UGCAGUGAGCUGCAGGCUA |
| 2922 | GUGCAGUGAGCUGCAGGCU |
| 2923 | GGUGCAGUGAGCUGCAGGC |
| 2924 | GGGUGCAGUGAGCUGCAGG |
| 2925 | CGGGUGCAGUGAGCUGCAG |
| 2926 | ACGGGUGCAGUGAGCUGCA |
| 2927 | CACGGGUGCAGUGAGCUGC |
| 2928 | CCACGGGUGCAGUGAGCUG |
| 2929 | GCCACGGGUGCAGUGAGCU |
| 2930 | GGCCACGGGUGCAGUGAGC |
| 2931 | CGGCCACGGGUGCAGUGAG |
| 2932 | CCGGCCACGGGUGCAGUGA |
| 2933 | GCCGGCCACGGGUGCAGUG |
| 2934 | GGCCGGCCACGGGUGCAGU |
| 2935 | UGGCCGGCCACGGGUGCAG |
| 2936 | CUGGCCGGCCACGGGUGCA |
| 2937 | GCUGGCCGGCCACGGGUGC |
| 2938 | AGCUGGCCGGCCACGGGUG |
| 2939 | CAGCUGGCCGGCCACGGGU |
| 2940 | CCAGCUGGCCGGCCACGGG |
| 2941 | CCCAGCUGGCCGGCCACGG |
| 2942 | GCCCAGCUGGCCGGCCACG |
| 2943 | CGCCCAGCUGGCCGGCCAC |
| 2944 | GCGCCCAGCUGGCCGGCCA |
| 2945 | GGCGCCCAGCUGGCCGGCC |
| 2946 | UGGCGCCCAGCUGGCCGGC |
| 2947 | GUGGCGCCCAGCUGGCCGG |
| 2948 | GGUGGCGCCCAGCUGGCCG |
| 2949 | UGGUGGCGCCCAGCUGGCC |
| 2950 | GUGGUGGCGCCCAGCUGGC |
| 2951 | GGUGGUGGCGCCCAGCUGG |
| 2952 | CGGUGGUGGCGCCCAGCUG |
| 2953 | ACGGUGGUGGCGCCCAGCU |
| 2954 | GACGGUGGUGGCGCCCAGC |
| 2955 | GGACGGUGGUGGCGCCCAG |
| 2956 | GGGACGGUGGUGGCGCCCA |
| 2957 | UGGGACGGUGGUGGCGCCC |
| 2958 | GUGGGACGGUGGUGGCGCC |
| 2959 | GGUGGGACGGUGGUGGCGC |
| 2960 | GGGUGGGACGGUGGUGGCG |
| 2961 | UGGGUGGGACGGUGGUGGC |
| 2962 | CUGGGUGGGACGGUGGUGG |
| 2963 | GCUGGGUGGGACGGUGGUG |
| 2964 | CGCUGGGUGGGACGGUGGU |
| 2965 | CCGCUGGGUGGGACGGUGG |
| 2966 | GCCGCUGGGUGGGACGGUG |
| 2967 | GGCCGCUGGGUGGGACGGU |
| 2968 | AGGCCGCUGGGUGGGACGG |
| 2969 | GAGGCCGCUGGGUGGGACG |
| 2970 | AGAGGCCGCUGGGUGGGAC |
| 2971 | GAGAGGCCGCUGGGUGGGA |
| 2972 | GGAGAGGCCGCUGGGUGGG |
| 2973 | CGGAGAGGCCGCUGGGUGG |
| 2974 | ACGGAGAGGCCGCUGGGUG |
| 2975 | UACGGAGAGGCCGCUGGGU |
| 2976 | GUACGGAGAGGCCGCUGGG |
| 2977 | GGUACGGAGAGGCCGCUGG |
| 2978 | GGGUACGGAGAGGCCGCUG |
| 2979 | AGGGUACGGAGAGGCCGCU |
| 2980 | AAGGGUACGGAGAGGCCGC |
| 2981 | GAAGGGUACGGAGAGGCCG |
| 2982 | AGAAGGGUACGGAGAGGCC |
| 2983 | GAGAAGGGUACGGAGAGGC |
| 2984 | GGAGAAGGGUACGGAGAGG |
| 2985 | UGGAGAAGGGUACGGAGAG |
| 2986 | GUGGAGAAGGGUACGGAGA |
| 2987 | AGUGGAGAAGGGUACGGAG |
| 2988 | AAGUGGAGAAGGGUACGGA |
| 2989 | CAAGUGGAGAAGGGUACGG |
| 2990 | CCAAGUGGAGAAGGGUACG |
| 2991 | CCCAAGUGGAGAAGGGUAC |
| 2992 | UCCCAAGUGGAGAAGGGUA |
| 2993 | GUCCCAAGUGGAGAAGGGU |
| 2994 | GGUCCCAAGUGGAGAAGGG |
| 2995 | UGGUCCCAAGUGGAGAAGG |
| 2996 | CUGGUCCCAAGUGGAGAAG |
| 2997 | CCUGGUCCCAAGUGGAGAA |
| 2998 | UCCUGGUCCCAAGUGGAGA |
| 2999 | AUCCUGGUCCCAAGUGGAG |
| 3000 | GAUCCUGGUCCCAAGUGGA |
| 3001 | UGAUCCUGGUCCCAAGUGG |
| 3002 | GUGAUCCUGGUCCCAAGUG |
| 3003 | CGUGAUCCUGGUCCCAAGU |
| 3004 | UCGUGAUCCUGGUCCCAAG |
| 3005 | GUCGUGAUCCUGGUCCCAA |
| 3006 | GGUCGUGAUCCUGGUCCCA |
| 3007 | AGGUCGUGAUCCUGGUCCC |
| 3008 | GAGGUCGUGAUCCUGGUCC |
| 3009 | GGAGGUCGUGAUCCUGGUC |
| 3010 | CGGAGGUCGUGAUCCUGGU |
| 3011 | GCGGAGGUCGUGAUCCUGG |
| 3012 | UGCGGAGGUCGUGAUCCUG |
| 3013 | CUGCGGAGGUCGUGAUCCU |
| 3014 | CCUGCGGAGGUCGUGAUCC |
| 3015 | CCCUGCGGAGGUCGUGAUC |
| 3016 | UCCCUGCGGAGGUCGUGAU |
| 3017 | GUCCCUGCGGAGGUCGUGA |
| 3018 | UGUCCCUGCGGAGGUCGUG |
| 3019 | UUGUCCCUGCGGAGGUCGU |
| 3020 | CUUGUCCCUGCGGAGGUCG |
| 3021 | UCUUGUCCCUGCGGAGGUC |
| 3022 | UUCUUGUCCCUGCGGAGGU |
| 3023 | GUUCUUGUCCCUGCGGAGG |
| 3024 | AGUUCUUGUCCCUGCGGAG |
| 3025 | CAGUUCUUGUCCCUGCGGA |
| 3026 | GCAGUUCUUGUCCCUGCGG |
| 3027 | CGCAGUUCUUGUCCCUGCG |
| 3028 | GCGCAGUUCUUGUCCCUGC |
| 3029 | GGCGCAGUUCUUGUCCCUG |
| 3030 | UGGCGCAGUUCUUGUCCCU |
| 3031 | UUGGCGCAGUUCUUGUCCC |
| 3032 | CUUGGCGCAGUUCUUGUCC |
| 3033 | UCUUGGCGCAGUUCUUGUC |
| 3034 | CUCUUGGCGCAGUUCUUGU |
| 3035 | GCUCUUGGCGCAGUUCUUG |
| 3036 | GGCUCUUGGCGCAGUUCUU |
| 3037 | AGGCUCUUGGCGCAGUUCU |
| 3038 | GAGGCUCUUGGCGCAGUUC |
| 3039 | AGAGGCUCUUGGCGCAGUU |
| 3040 | GAGAGGCUCUUGGCGCAGU |
| 3041 | AGAGAGGCUCUUGGCGCAG |
| 3042 | CAGAGAGGCUCUUGGCGCA |
| 3043 | CCAGAGAGGCUCUUGGCGC |
| 3044 | UCCAGAGAGGCUCUUGGCG |
| 3045 | CUCCAGAGAGGCUCUUGGC |
| 3046 | CCUCCAGAGAGGCUCUUGG |
| 3047 | GCCUCCAGAGAGGCUCUUG |
| 3048 | AGCCUCCAGAGAGGCUCUU |
| 3049 | CAGCCUCCAGAGAGGCUCU |
| 3050 | CCAGCCUCCAGAGAGGCUC |
| 3051 | ACCAGCCUCCAGAGAGGCU |
| 3052 | CACCAGCCUCCAGAGAGGC |
| 3053 | CCACCAGCCUCCAGAGAGG |
| 3054 | ACCACCAGCCUCCAGAGAG |
| 3055 | AACCACCAGCCUCCAGAGA |
| 3056 | AAACCACCAGCCUCCAGAG |
| 3057 | CAAACCACCAGCCUCCAGA |
| 3058 | CCAAACCACCAGCCUCCAG |
| 3059 | GCCAAACCACCAGCCUCCA |
| 3060 | UGCCAAACCACCAGCCUCC |
| 3061 | GUGCCAAACCACCAGCCUC |
| 3062 | GGUGCCAAACCACCAGCCU |
| 3063 | AGGUGCCAAACCACCAGCC |
| 3064 | CAGGUGCCAAACCACCAGC |
| 3065 | GCAGGUGCCAAACCACCAG |
| 3066 | UGCAGGUGCCAAACCACCA |
| 3067 | CUGCAGGUGCCAAACCACC |
| 3068 | GCUGCAGGUGCCAAACCAC |
| 3069 | GGCUGCAGGUGCCAAACCA |
| 3070 | UGGCUGCAGGUGCCAAACC |
| 3071 | AUGGCUGCAGGUGCCAAAC |
| 3072 | AAUGGCUGCAGGUGCCAAA |
| 3073 | GAAUGGCUGCAGGUGCCAA |
| 3074 | GGAAUGGCUGCAGGUGCCA |
| 3075 | UGGAAUGGCUGCAGGUGCC |
| 3076 | UUGGAAUGGCUGCAGGUGC |
| 3077 | GUUGGAAUGGCUGCAGGUG |
| 3078 | GGUUGGAAUGGCUGCAGGU |
| 3079 | AGGUUGGAAUGGCUGCAGG |
| 3080 | GAGGUUGGAAUGGCUGCAG |
| 3081 | UGAGGUUGGAAUGGCUGCA |
| 3082 | UUGAGGUUGGAAUGGCUGC |
| 3083 | GUUGAGGUUGGAAUGGCUG |
| 3084 | CGUUGAGGUUGGAAUGGCU |
| 3085 | CCGUUGAGGUUGGAAUGGC |
| 3086 | GCCGUUGAGGUUGGAAUGG |
| 3087 | GGCCGUUGAGGUUGGAAUG |
| 3088 | UGGCCGUUGAGGUUGGAAU |
| 3089 | CUGGCCGUUGAGGUUGGAA |
| 3090 | ACUGGCCGUUGAGGUUGGA |
| 3091 | UACUGGCCGUUGAGGUUGG |
| 3092 | GUACUGGCCGUUGAGGUUG |
| 3093 | AGUACUGGCCGUUGAGGUU |
| 3094 | AAGUACUGGCCGUUGAGGU |
| 3095 | GAAGUACUGGCCGUUGAGG |
| 3096 | GGAAGUACUGGCCGUUGAG |
| 3097 | CGGAAGUACUGGCCGUUGA |
| 3098 | GCGGAAGUACUGGCCGUUG |
| 3099 | AGCGGAAGUACUGGCCGUU |
| 3100 | GAGCGGAAGUACUGGCCGU |
| 3101 | GGAGCGGAAGUACUGGCCG |
| 3102 | UGGAGCGGAAGUACUGGCC |
| 3103 | AUGGAGCGGAAGUACUGGC |
| 3104 | GAUGGAGCGGAAGUACUGG |
| 3105 | GGAUGGAGCGGAAGUACUG |
| 3106 | GGGAUGGAGCGGAAGUACU |
| 3107 | UGGGAUGGAGCGGAAGUAC |
| 3108 | GUGGGAUGGAGCGGAAGUA |
| 3109 | UGUGGGAUGGAGCGGAAGU |
| 3110 | CUGUGGGAUGGAGCGGAAG |
| 3111 | GCUGUGGGAUGGAGCGGAA |
| 3112 | UGCUGUGGGAUGGAGCGGA |
| 3113 | CUGCUGUGGGAUGGAGCGG |
| 3114 | GCUGCUGUGGGAUGGAGCG |
| 3115 | CGCUGCUGUGGGAUGGAGC |
| 3116 | CCGCUGCUGUGGGAUGGAG |
| 3117 | GCCGCUGCUGUGGGAUGGA |
| 3118 | UGCCGCUGCUGUGGGAUGG |
| 3119 | CUGCCGCUGCUGUGGGAUG |
| 3120 | UCUGCCGCUGCUGUGGGAU |
| 3121 | UUCUGCCGCUGCUGUGGGA |
| 3122 | CUUCUGCCGCUGCUGUGGG |
| 3123 | GCUUCUGCCGCUGCUGUGG |
| 3124 | AGCUUCUGCCGCUGCUGUG |
| 3125 | AAGCUUCUGCCGCUGCUGU |
| 3126 | UAAGCUUCUGCCGCUGCUG |
| 3127 | UUAAGCUUCUGCCGCUGCU |
| 3128 | CUUAAGCUUCUGCCGCUGC |
| 3129 | UCUUAAGCUUCUGCCGCUG |
| 3130 | UUCUUAAGCUUCUGCCGCU |
| 3131 | CUUCUUAAGCUUCUGCCGC |
| 3132 | CCUUCUUAAGCUUCUGCCG |
| 3133 | CCCUUCUUAAGCUUCUGCC |
| 3134 | UCCCUUCUUAAGCUUCUGC |
| 3135 | UUCCCUUCUUAAGCUUCUG |
| 3136 | AUUCCCUUCUUAAGCUUCU |
| 3137 | GAUUCCCUUCUUAAGCUUC |
| 3138 | AGAUUCCCUUCUUAAGCUU |
| 3139 | AAGAUUCCCUUCUUAAGCU |
| 3140 | GAAGAUUCCCUUCUUAAGC |
| 3141 | AGAAGAUUCCCUUCUUAAG |
| 3142 | CAGAAGAUUCCCUUCUUAA |
| 3143 | CCAGAAGAUUCCCUUCUUA |
| 3144 | UCCAGAAGAUUCCCUUCUU |
| 3145 | UUCCAGAAGAUUCCCUUCU |
| 3146 | CUUCCAGAAGAUUCCCUUC |
| 3147 | UCUUCCAGAAGAUUCCCUU |
| 3148 | GUCUUCCAGAAGAUUCCCU |
| 3149 | GGUCUUCCAGAAGAUUCCC |
| 3150 | AGGUCUUCCAGAAGAUUCC |
| 3151 | CAGGUCUUCCAGAAGAUUC |
| 3152 | CCAGGUCUUCCAGAAGAUU |
| 3153 | GCCAGGUCUUCCAGAAGAU |
| 3154 | CGCCAGGUCUUCCAGAAGA |
| 3155 | CCGCCAGGUCUUCCAGAAG |
| 3156 | CCCGCCAGGUCUUCCAGAA |
| 3157 | CCCCGCCAGGUCUUCCAGA |
| 3158 | GCCCCGCCAGGUCUUCCAG |
| 3159 | GGCCCCGCCAGGUCUUCCA |
| 3160 | CGGCCCCGCCAGGUCUUCC |
| 3161 | GCGGCCCCGCCAGGUCUUC |
| 3162 | AGCGGCCCCGCCAGGUCUU |
| 3163 | UAGCGG CCGCCAGGUCU |
| 3164 | GUAGCGGCCCCGCCAGGUC |
| 3165 | AGUAGCGGCCCCGCCAGGU |
| 3166 | UAGUAGCGGCCCCGCCAGG |
| 3167 | GUAGUAGCGGCCCCGCCAG |
| 3168 | GGUAGUAGCGGCCCCGCCA |
| 3169 | GGGUAGUAGCGGCCCCGCC |
| 3170 | CGGGUAGUAGCGGCCCCGC |
| 3171 | GCGGGUAGUAGCGGCCCCG |
| 3172 | AGCGGGUAGUAGCGGCCCC |
| 3173 | CAGCGGGUAGUAGCGGCCC |
| 3174 | GCAGCGGGUAGUAGCGGCC |
| 3175 | UGCAGCGGGUAGUAGCGGC |
| 3176 | CUGCAGCGGGUAGUAGCGG |
| 3177 | CCUGCAGCGGGUAGUAGCG |
| 3178 | GCCUGCAGCGGGUAGUAGC |
| 3179 | GGCCUGCAGCGGGUAGUAG |
| 3180 | UGGCCUGCAGCGGGUAGUA |
| 3181 | GUGGCCUGCAGCGGGUAGU |
| 3182 | GGUGGCCUGCAGCGGGUAG |
| 3183 | UGGUGGCCUGCAGCGGGUA |
| 3184 | GUGGUGGCCUGCAGCGGGU |
| 3185 | GGUGGUGGCCUGCAGCGGG |
| 3186 | UGGUGGUGGCCUGCAGCGG |
| 3187 | AUGGUGGUGGCCUGCAGCG |
| 3188 | CAUGGUGGUGGCCUGCAGC |
| 3189 | ACAUGGUGGUGGCCUGCAG |
| 3190 | AACAUGGUGGUGGCCUGCA |
| 3191 | CAACAUGGUGGUGGCCUGC |
| 3192 | UCAACAUGGUGGUGGCCUG |
| 3193 | AUCAACAUGGUGGUGGCCU |
| 3194 | GAUCAACAUGGUGGUGGCC |
| 3195 | GGAUCAACAUGGUGGUGGC |
| 3196 | UGGAUCAACAUGGUGGUGG |
| 3197 | CUGGAUCAACAUGGUGGUG |
| 3198 | GCUGGAUCAACAUGGUGGU |
| 3199 | GGCUGGAUCAACAUGGUGG |
| 3200 | GGGCUGGAUCAACAUGGUG |
| 3201 | UGGGCUGGAUCAACAUGGU |
| 3202 | AUGGGCUGGAUCAACAUGG |
| 3203 | CAUGGGCUGGAUCAACAUG |
| 3204 | CCAUGGGCUGGAUCAACAU |
| 3205 | GCCAUGGGCUGGAUCAACA |
| 3206 | UGCCAUGGGCUGGAUCAAC |
| 3207 | CUGCCAUGGGCUGGAUCAA |
| 3208 | GCUGCCAUGGGCUGGAUCA |
| 3209 | UGCUGCCAUGGGCUGGAUC |
| 3210 | CUGCUGCCAUGGGCUGGAU |
| 3211 | UCUGCUGCCAUGGGCUGGA |
| 3212 | CUCUGCUGCCAUGGGCUGG |
| 3213 | CCUCUGCUGCCAUGGGCUG |
| 3214 | GCCUCUGCUGCCAUGGGCU |
| 3215 | UGCCUCUGCUGCCAUGGGC |
| 3216 | CUGCCUCUGCUGCCAUGGG |
| 3217 | GCUGCCUCUGCUGCCAUGG |
| 3218 | GGCUGCCUCUGCUGCCAUG |
| 3219 | AGGCUGCCUCUGCUGCCAU |
| 3220 | GAGGCUGCCUCUGCUGCCA |
| 3221 | GGAGGCUGCCUCUGCUGCC |
| 3222 | AGGAGGCUGCCUCUGCUGC |
| 3223 | UAGGAGGCUGCCUCUGCUG |
| 3224 | CUAGGAGGCUGCCUCUGCU |
| 3225 | GCUAGGAGGCUGCCUCUGC |
| 3226 | CGCUAGGAGGCUGCCUCUG |
| 3227 | ACGCUAGGAGGCUGCCUCU |
| 3228 | GACGCUAGGAGGCUGCCUC |
| 3229 | GGACGCUAGGAGGCUGCCU |
| 3230 | AGGACGCUAGGAGGCUGCC |
| 3231 | CAGGACGCUAGGAGGCUGC |
| 3232 | CCAGGACGCUAGGAGGCUG |
| 3233 | GCCAGGACGCUAGGAGGCU |
| 3234 | AGCCAGGACGCUAGGAGGC |
| 3235 | CAGCCAGGACGCUAGGAGG |
| 3236 | CCAGCCAGGACGCUAGGAG |
| 3237 | CCCAGCCAGGACGCUAGGA |
| 3238 | GCCCAGCCAGGACGCUAGG |
| 3239 | GGCCCAGCCAGGACGCUAG |
| 3240 | AGGCCCAGCCAGGACGCUA |
| 3241 | CAGGCCCAGCCAGGACGCU |
| 3242 | CCAGGCCCAGCCAGGACGC |
| 3243 | ACCAGGCCCAGCCAGGACG |
| 3244 | GACCAGGCCCAGCCAGGAC |
| 3245 | GGACCAGGCCCAGCCAGGA |
| 3246 | GGGACCAGGCCCAGCCAGG |
| 3247 | UGGGACCAGGCCCAGCCAG |
| 3248 | CUGGGACCAGGCCCAGCCA |
| 3249 | CCUGGGACCAGGCCCAGCC |
| 3250 | GCCUGGGACCAGGCCCAGC |
| 3251 | GGCCUGGGACCAGGCCCAG |
| 3252 | GGGCCUGGGACCAGGCCCA |
| 3253 | UGGGCCUGGGACCAGGCCC |
| 3254 | GUGGGCCUGGGACCAGGCC |
| 3255 | CGUGGGCCUGGGACCAGGC |
| 3256 | UCGUGGGCCUGGGACCAGG |
| 3257 | UUCGUGGGCCUGGGACCAG |
| 3258 | UUUCGUGGGCCUGGGACCA |
| 3259 | CUUUCGUGGGCCUGGGACC |
| 3260 | UCUUUCGUGGGCCUGGGAC |
| 3261 | GUCUUUCGUGGGCCUGGGA |
| 3262 | CGUCUUUCGUGGGCCUGGG |
| 3263 | CCGUCUUUCGUGGGCCUGG |
| 3264 | ACCGUCUUUCGUGGGCCUG |
| 3265 | CACCGUCUUUCGUGGGCCU |
| 3266 | UCACCGUCUUUCGUGGGCC |
| 3267 | GUCACCGUCUUUCGUGGGC |
| 3268 | AGUCACCGUCUUUCGUGGG |
| 3269 | GAGUCACCGUCUUUCGUGG |
| 3270 | AGAGUCACCGUCUUUCGUG |
| 3271 | AAGAGUCACCGUCUUUCGU |
| 3272 | CAAGAGUCACCGUCUUUCG |
| 3273 | CCAAGAGUCACCGUCUUUC |
| 3274 | GCCAAGAGUCACCGUCUUU |
| 3275 | AGCCAAGAGUCACCGUCUU |
| 3276 | GAGCCAAGAGUCACCGUCU |
| 3277 | AGAGCCAAGAGUCACCGUC |
| 3278 | CAGAGCCAAGAGUCACCGU |
| 3279 | GCAGAGCCAAGAGUCACCG |
| 3280 | GGCAGAGCCAAGAGUCACC |
| 3281 | GGGCAGAGCCAAGAGUCAC |
| 3282 | CGGGCAGAGCCAAGAGUCA |
| 3283 | UCGGGCAGAGCCAAGAGUC |
| 3284 | CUCGGGCAGAGCCAAGAGU |
| 3285 | CCUCGGGCAGAGCCAAGAG |
| 3286 | UCCUCGGGCAGAGCCAAGA |
| 3287 | AUCCUCGGGCAGAGCCAAG |
| 3288 | CAUCCUCGGGCAGAGCCAA |
| 3289 | ACAUCCUCGGGCAGAGCCA |
| 3290 | CACAUCCUCGGGCAGAGCC |
| 3291 | CCACAUCCUCGGGCAGAGC |
| 3292 | GCCACAUCCUCGGGCAGAG |
| 3293 | GGCCACAUCCUCGGGCAGA |
| 3294 | CGGCCACAUCCUCGGGCAG |
| 3295 | ACGGCCACAUCCUCGGGCA |
| 3296 | AACGGCCACAUCCUCGGGC |
| 3297 | GAACGGCCACAUCCUCGGG |
| 3298 | GGAACGGCCACAUCCUCGG |
| 3299 | GGGAACGGCCACAUCCUCG |
| 3300 | AGGGAACGGCCACAUCCUC |
| 3301 | CAGGGAACGGCCACAUCCU |
| 3302 | GCAGGGAACGGCCACAUCC |
| 3303 | GGCAGGGAACGGCCACAUC |
| 3304 | AGGCAGGGAACGGCCACAU |
| 3305 | CAGGCAGGGAACGGCCACA |
| 3306 | CCAGGCAGGGAACGGCCAC |
| 3307 | CCCAGGCAGGGAACGGCCA |
| 3308 | GCCCAGGCAGGGAACGGCC |
| 3309 | UGCCCAGGCAGGGAACGGC |
| 3310 | CUGCCCAGGCAGGGAACGG |
| 3311 | CCUGCCCAGGCAGGGAACG |
| 3312 | CCCUGCCCAGGCAGGGAAC |
| 3313 | CCCCUGCCCAGGCAGGGAA |
| 3314 | GCCCCUGCCCAGGCAGGGA |
| 3315 | AGCCCCUGCCCAGGCAGGG |
| 33 16 | GAGCCCCUGCCCAGGCAGG |
| 3317 | GGAGCCCCUGCCCAGGCAG |
| 3318 | UGGAGCCCCUGCCCAGGCA |
| 3319 | UUGGAGCCCCUGCCCAGGC |
| 3320 | CUUGGAGCCCCUGCCCAGG |
| 3321 | CCUUGGAGCCCCUGCCCAG |
| 3322 | UCCUUGGAGCCCCUGCCCA |
| 3323 | CUCCUUGGAGCCCCUGCCC |
| 3324 | CCUCCUUGGAGCCCCUGCC |
| 3325 | CCCUCCUUGGAGCCCCUGC |
| 3326 | CCCCUCCUUGGAGCCCCUG |
| 3327 | GCCCCUCCUUGGAGCCCCU |
| 3328 | GGCCCCUCCUUGGAGCCCC |
| 3329 | UGGCCCCUCCUUGGAGCCC |
| 3330 | AUGGCCCCUCCUUGGAGCC |
| 3331 | GAUGGCCCCUCCUUGGAGC |
| 3332 | AGAUGGCCCCUCCUUGGAG |
| 3333 | CAGAUGGCCCCUCCUUGGA |
| 3334 | CCAGAUGGCCCCUCCUUGG |
| 3335 | UCCAGAUGGCCCCUCCUUG |
| 3336 | UUCCAGAUGGCCCCUCCUU |
| 3337 | UUUCCAGAUGGCCCCUCCU |
| 3338 | GUUUCCAGAUGGCCCCUCC |
| 3339 | AGUUUCCAGAUGGCCCCUC |
| 3340 | AAGUUUCCAGAUGGCCCCU |
| 3341 | CAAGUUUCCAGAUGGCCCC |
| 3342 | ACAAGUUUCCAGAUGGCCC |
| 3343 | CACAAGUUUCCAGAUGGCC |
| 3344 | CCACAAGUUUCCAGAUGGC |
| 3345 | UCCACAAGUUUCCAGAUGG |
| 3346 | GUCCACAAGUUUCCAGAUG |
| 3347 | UGUCCACAAGUUUCCAGAU |
| 3348 | CUGUCCACAAGUUUCCAGA |
| 3349 | UCUGUCCACAAGUUUCCAG |
| 3350 | CUCUGUCCACAAGUUUCCA |
| 3351 | UCUCUGUCCACAAGUUUCC |
| 3352 | UUCUCUGUCCACAAGUUUC |
| 3353 | CUUCUCUGUCCACAAGUUU |
| 3354 | UCUUCUCUGUCCACAAGUU |
| 3355 | UUCUUCUCUGUCCACAAGU |
| 3356 | CUUCUUCUCUGUCCACAAG |
| 3357 | UCUUCUUCUCUGUCCACAA |
| 3358 | GUCUUCUUCUCUGUCCACA |
| 3359 | GGUCUUCUUCUCUGUCCAC |
| 3360 | UGGUCUUCUUCUCUGUCCA |
| 3361 | GUGGUCUUCUUCUCUGUCC |
| 3362 | CGUGGUCUUCUUCUCUGUC |
| 3363 | UCGUGGUCUUCUUCUCUGU |
| 3364 | GUCGUGGUCUUCUUCUCUG |
| 3365 | AGUCGUGGUCUUCUUCUCU |
| 3366 | CAGUCGUGGUCUUCUUCUC |
| 3367 | CCAGUCGUGGUCUUCUUCU |
| 3368 | UCCAGUCGUGGUCUUCUUC |
| 3369 | CUCCAGUCGUGGUCUUCUU |
| 3370 | UCUCCAGUCGUGGUCUUCU |
| 3371 | UUCUCCAGUCGUGGUCUUC |
| 3372 | CUUCUCCAGUCGUGGUCUU |
| 3373 | GCUUCUCCAGUCGUGGUCU |
| 3374 | GGCUUCUCCAGUCGUGGUC |
| 3375 | GGGCUUCUCCAGUCGUGGU |
| 3376 | GGGGCUUCUCCAGUCGUGG |
| 3377 | GGGGGCUUCUCCAGUCGUG |
| 3378 | AGGGGGCUUCUCCAGUCGU |
| 3379 | AAGGGGGCUUCUCCAGUCG |
| 3380 | AAAGGGGGCUUCUCCAGUC |
| 3381 | GAAAGGGGGCUUCUCCAGU |
| 3382 | AGAAAGGGGGCUUCUCCAG |
| 3383 | CAGAAAGGGGGCUUCUCCA |
| 3384 | UCAGAAAGGGGGCUUCUCC |
| 3385 | CUCAGAAAGGGGGCUUCUC |
| 3386 | ACUCAGAAAGGGGGCUUCU |
| 3387 | CACUCAGAAAGGGGGCUUC |
| 3388 | GCACUCAGAAAGGGGGCUU |
| 3389 | UGCACUCAGAAAGGGGGCU |
| 3390 | CUGCACUCAGAAAGGGGGC |
| 3391 | CCUGCACUCAGAAAGGGGG |
| 3392 | CCCUGCACUCAGAAAGGGG |
| 3393 | CCCCUGCACUCAGAAAGGG |
| 3394 | CCCCCUGCACUCAGAAAGG |
| 3395 | CCCCCCUGCACUCAGAAAG |
| 3396 | GCCCCCCUGCACUCAGAAA |
| 3397 | AGCCCCCCUGCACUCAGAA |
| 3398 | CAGCCCCCCUGCACUCAGA |
| 3399 | GCAGCCCCCCUGCACUCAG |
| 3400 | UGCAGCCCCCCUGCACUCA |
| 3401 | AUGCAGCCCCCCUGCACUC |
| 3402 | CAUGCAGCCCCCCUGCACU |
| 3403 | GCAUGCAGCCCCCCUGCAC |
| 3404 | CGCAUGCAGCCCCCCUGCA |
| 3405 | ACGCAUGCAGCCCCCCUGC |
| 3406 | AACGCAUGCAGCCCCCCUG |
| 3407 | CAACGCAUGCAGCCCCCCU |
| 3408 | GCAACGCAUGCAGCCCCCC |
| 3409 | GGCAACGCAUGCAGCCCCC |
| 3410 | AGGCAACGCAUGCAGCCCC |
| 3411 | GAGGCAACGCAUGCAGCCC |
| 3412 | GGAGGCAACGCAUGCAGCC |
| 3413 | AGGAGGCAACGCAUGCAGC |
| 3414 | CAGGAGGCAACGCAUGCAG |
| 3415 | UCAGGAGGCAACGCAUGCA |
| 3416 | CUCAGGAGGCAACGCAUGC |
| 3417 | UCUCAGGAGGCAACGCAUG |
| 3418 | AUCUCAGGAGGCAACGCAU |
| 3419 | GAUCUCAGGAGGCAACGCA |
| 3420 | CGAUCUCAGGAGGCAACGC |
| 3421 | UCGAUCUCAGGAGGCAACG |
| 3422 | CUCGAUCUCAGGAGGCAAC |
| 3423 | CCUCGAUCUCAGGAGGCAA |
| 3424 | GCCUCGAUCUCAGGAGGCA |
| 3425 | AGCCUCGAUCUCAGGAGGC |
| 3426 | CAGCCUCGAUCUCAGGAGG |
| 3427 | GCAGCCUCGAUCUCAGGAG |
| 3428 | UGCAGCCUCGAUCUCAGGA |
| 3429 | CUGCAGCCUCGAUCUCAGG |
| 3430 | CCUGCAGCCUCGAUCUCAG |
| 3431 | UCCUGCAGCCUCGAUCUCA |
| 3432 | AUCCUGCAGCCUCGAUCUC |
| 3433 | UAUCCUGCAGCCUCGAUCU |
| 3434 | AUAUCCUGCAGCCUCGAUC |
| 3435 | CAUAUCCUGCAGCCUCGAU |
| 3436 | GCAUAUCCUGCAGCCUCGA |
| 3437 | AGCAUAUCCUGCAGCCUCG |
| 3438 | GAGCAUAUCCUGCAGCCUC |
| 3439 | UGAGCAUAUCCUGCAGCCU |
| 3440 | CUGAGCAUAUCCUGCAGCC |
| 3441 | UCUGAGCAUAUCCUGCAGC |
| 3442 | GUCUGAGCAUAUCCUGCAG |
| 3443 | AGUCUGAGCAUAUCCUGCA |
| 3444 | GAGUCUGAGCAUAUCCUGC |
| 3445 | AGAGUCUGAGCAUAUCCUG |
| 3446 | UAGAGUCUGAGCAUAUCCU |
| 3447 | CUAGAGUCUGAGCAUAUCC |
| 3448 | UCUAGAGUCUGAGCAUAUC |
| 3449 | CUCUAGAGUCUGAGCAUAU |
| 3450 | CCUCUAGAGUCUGAGCAUA |
| 3451 | GCCUCUAGAGUCUGAGCAU |
| 3452 | CGCCUCUAGAGUCUGAGCA |
| 3453 | ACGCCUCUAGAGUCUGAGC |
| 3454 | CACGCCUCUAGAGUCUGAG |
| 3455 | CCACGCCUCUAGAGUCUGA |
| 3456 | UCCACGCCUCUAGAGUCUG |
| 3457 | GUCCACGCCUCUAGAGUCU |
| 3458 | GGUCCACGCCUCUAGAGUC |
| 3459 | UGGUCCACGCCUCUAGAGU |
| 3460 | UUGGUCCACGCCUCUAGAG |
| 3461 | CUUGGUCCACGCCUCUAGA |
| 3462 | CCUUGGUCCACGCCUCUAG |
| 3463 | CCCUUGGUCCACGCCUCUA |
| 3464 | CCCCUUGGUCCACGCCUCU |
| 3465 | GCCCCUUGGUCCACGCCUC |
| 3466 | UGCCCCUUGGUCCACGCCU |
| 3467 | AUGCCCCUUGGUCCACGCC |
| 3468 | CAUGCCCCUUGGUCCACGC |
| 3469 | CCAUGCCCCUUGGUCCACG |
| 3470 | UCCAUGCCCCUUGGUCCAC |
| 3471 | CUCCAUGCCCCUUGGUCCA |
| 3472 | GCUCCAUGCCCCUUGGUCC |
| 3473 | AGCUCCAUGCCCCUUGGUC |
| 3474 | AAGCUCCAUGCCCCUUGGU |
| 3475 | GAAGCUCCAUGCCCCUUGG |
| 3476 | UGAAGCUCCAUGCCCCUUG |
| 3477 | GUGAAGCUCCAUGCCCCUU |
| 3478 | AGUGAAGCUCCAUGCCCCU |
| 3479 | GAGUGAAGCUCCAUGCCCC |
| 3480 | GGAGUGAAGCUCCAUGCCC |
| 3481 | AGGAGUGAAGCUCCAUGCC |
| 3482 | AAGGAGUGAAGCUCCAUGC |
| 3483 | CAAGGAGUGAAGCUCCAUG |
| 3484 | GCAAGGAGUGAAGCUCCAU |
| 3485 | AGCAAGGAGUGAAGCUCCA |
| 3486 | CAGCAAGGAGUGAAGCUCC |
| 3487 | CCAGCAAGGAGUGAAGCUC |
| 3488 | GCCAGCAAGGAGUGAAGCU |
| 3489 | GGCCAGCAAGGAGUGAAGC |
| 3490 | UGGCCAGCAAGGAGUGAAG |
| 3491 | CUGGCCAGCAAGGAGUGAA |
| 3492 | CCUGGCCAGCAAGGAGUGA |
| 3493 | CCCUGGCCAGCAAGGAGUG |
| 3494 | UCCCUGGCCAGCAAGGAGU |
| 3495 | CUCCCUGGCCAGCAAGGAG |
| 3496 | ACUCCCUGGCCAGCAAGGA |
| 3497 | AACUCCCUGGCCAGCAAGG |
| 3498 | CAACUCCCUGGCCAGCAAG |
| 3499 | CCAACUCCCUGGCCAGCAA |
| 3500 | CCCAACUCCCUGGCCAGCA |
| 3501 | CCCCAACUCCCUGGCCAGC |
| 3502 | UCCCCAACUCCCUGGCCAG |
| 3503 | GUCCCCAACUCCCUGGCCA |
| 3504 | AGUCCCCAACUCCCUGGCC |
| 3505 | GAGUCCCCAACUCCCUGGC |
| 3506 | UGAGUCCCCAACUCCCUGG |
| 3507 | CUGAGUCCCCAACUCCCUG |
| 3508 | UCUGAGUCCCCAACUCCCU |
| 3509 | CUCUGAGUCCCCAACUCCC |
| 3510 | CCUCUGAGUCCCCAACUCC |
| 3511 | CCCUCUGAGUCCCCAACUC |
| 3512 | UCCCUCUGAGUCCCCAACU |
| 3513 | GUCCCUCUGAGUCCCCAAC |
| 3514 | GGUCCCUCUGAGUCCCCAA |
| 3515 | UGGUCCCUCUGAGUCCCCA |
| 3516 | GUGGUCCCUCUGAGUCCCC |
| 3517 | AGUGGUCCCUCUGAGUCCC |
| 3518 | AAGUGGUCCCUCUGAGUCC |
| 3519 | CAAGUGGUCCCUCUGAGUC |
| 3520 | CCAAGUGGUCCCUCUGAGU |
| 3521 | CCCAAGUGGUCCCUCUGAG |
| 3522 | CCCCAAGUGGUCCCUCUGA |
| 3523 | GCCCCAAGUGGUCCCUCUG |
| 3524 | GGCCCCAAGUGGUCCCUCU |
| 3525 | UGGCCCCAAGUGGUCCCUC |
| 3526 | CUGGCCCCAAGUGGUCCCU |
| 3527 | GCUGGCCCCAAGUGGUCCC |
| 3528 | GGCUGGCCCCAAGUGGUCC |
| 3529 | UGGCUGGCCCCAAGUGGUC |
| 3530 | CUGGCUGGCCCCAAGUGGU |
| 3531 | UCUGGCUGGCCCCAAGUGG |
| 3532 | GUCUGGCUGGCCCCAAGUG |
| 3533 | AGUCUGGCUGGCCCCAAGU |
| 3534 | CAGUCUGGCUGGCCCCAAG |
| 3535 | CCAGUCUGGCUGGCCCCAA |
| 3536 | GCCAGUCUGGCUGGCCCCA |
| 3537 | GGCCAGUCUGGCUGGCCCC |
| 3538 | AGGCCAGUCUGGCUGGCCC |
| 3539 | GAGGCCAGUCUGGCUGGCC |
| 3540 | UGAGGCCAGUCUGGCUGGC |
| 3541 | UUGAGGCCAGUCUGGCUGG |
| 3542 | AUUGAGGCCAGUCUGGCUG |
| 3543 | CAUUGAGGCCAGUCUGGCU |
| 3544 | CCAUUGAGGCCAGUCUGGC |
| 3545 | GCCAUUGAGGCCAGUCUGG |
| 3546 | CGCCAUUGAGGCCAGUCUG |
| 3547 | CCGCCAUUGAGGCCAGUCU |
| 3548 | UCCGCCAUUGAGGCCAGUC |
| 3549 | GUCCGCCAUUGAGGCCAGU |
| 3550 | AGUCCGCCAUUGAGGCCAG |
| 3551 | GAGUCCGCCAUUGAGGCCA |
| 3552 | UGAGUCCGCCAUUGAGGCC |
| 3553 | CUGAGUCCGCCAUUGAGGC |
| 3554 | ACUGAGUCCGCCAUUGAGG |
| 3555 | GACUGAGUCCGCCAUUGAG |
| 3556 | UGACUGAGUCCGCCAUUGA |
| 3557 | GUGACUGAGUCCGCCAUUG |
| 3558 | UGUGACUGAGUCCGCCAUU |
| 3559 | AUGUGACUGAGUCCGCCAU |
| 3560 | AAUGUGACUGAGUCCGCCA |
| 3561 | CAAUGUGACUGAGUCCGCC |
| 3562 | UCAAUGUGACUGAGUCCGC |
| 3563 | GUCAAUGUGACUGAGUCCG |
| 3564 | AGUCAAUGUGACUGAGUCC |
| 3565 | CAGUCAAUGUGACUGAGUC |
| 3566 | UCAGUCAAUGUGACUGAGU |
| 3567 | GUCAGUCAAUGUGACUGAG |
| 3568 | CGUCAGUCAAUGUGACUGA |
| 3569 | CCGUCAGUCAAUGUGACUG |
| 3570 | CCCGUCAGUCAAUGUGACU |
| 3571 | CCCCGUCAGUCAAUGUGAC |
| 3572 | UCCCCGUCAGUCAAUGUGA |
| 3573 | GUCCCCGUCAGUCAAUGUG |
| 3574 | GGUCCCCGUCAGUCAAUGU |
| 3575 | UGGUCCCCGUCAGUCAAUG |
| 3576 | CUGGUCCCCGUCAGUCAAU |
| 3577 | CCUGGUCCCCGUCAGUCAA |
| 3578 | CCCUGGUCCCCGUCAGUCA |
| 3579 | GCCCUGGUCCCCGUCAGUC |
| 3580 | AGCCCUGGUCCCCGUCAGU |
| 3581 | AAGCCCUGGUCCCCGUCAG |
| 3582 | CAAGCCCUGGUCCCCGUCA |
| 3583 | ACAAGCCCUGGUCCCCGUC |
| 3584 | CACAAGCCCUGGUCCCCGU |
| 3585 | ACACAAGCCCUGGUCCCCG |
| 3586 | CACACAAGCCCUGGUCCCC |
| 3587 | CCACACAAGCCCUGGUCCC |
| 3588 | CCCACACAAGCCCUGGUCC |
| 3589 | ACCCACACAAGCCCUGGUC |
| 3590 | GACCCACACAAGCCCUGGU |
| 3591 | CGACCCACACAAGCCCUGG |
| 3592 | UCGACCCACACAAGCCCUG |
| 3593 | CUCGACCCACACAAGCCCU |
| 3594 | UCUCGACCCACACAAGCCC |
| 3595 | CUCUCGACCCACACAAGCC |
| 3596 | GCUCUCGACCCACACAAGC |
| 3597 | CGCUCUCGACCCACACAAG |
| 3598 | GCGCUCUCGACCCACACAA |
| 3599 | GGCGCUCUCGACCCACACA |
| 3600 | GGGCGCUCUCGACCCACAC |
| 3601 | AGGGCGCUCUCGACCCACA |
| 3602 | GAGGGCGCUCUCGACCCAC |
| 3603 | UGAGGGCGCUCUCGACCCA |
| 3604 | AUGAGGGCGCUCUCGACCC |
| 3605 | CAUGAGGGCGCUCUCGACC |
| 3606 | CCAUGAGGGCGCUCUCGAC |
| 3607 | ACCAUGAGGGCGCUCUCGA |
| 3608 | CACCAUGAGGGCGCUCUCG |
| 3609 | GCACCAUGAGGGCGCUCUC |
| 3610 | AGCACCAUGAGGGCGCUCU |
| 3611 | CAGCACCAUGAGGGCGCUC |
| 3612 | CCAGCACCAUGAGGGCGCU |
| 3613 | ACCAGCACCAUGAGGGCGC |
| 3614 | CACCAGCACCAUGAGGGCG |
| 3615 | GCACCAGCACCAUGAGGGC |
| 3616 | AGCACCAGCACCAUGAGGG |
| 3617 | CAGCACCAGCACCAUGAGG |
| 3618 | ACAGCACCAGCACCAUGAG |
| 3619 | AACAGCACCAGCACCAUGA |
| 3620 | CAACAGCACCAGCACCAUG |
| 3621 | ACAACAGCACCAGCACCAU |
| 3622 | CACAACAGCACCAGCACCA |
| 3623 | ACACAACAGCACCAGCACC |
| 3624 | CACACAACAGCACCAGCAC |
| 3625 | ACACACAACAGCACCAGCA |
| 3626 | UACACACAACAGCACCAGC |
| 3627 | CUACACACAACAGCACCAG |
| 3628 | CCUACACACAACAGCACCA |
| 3629 | ACCUACACACAACAGCACC |
| 3630 | GACCUACACACAACAGCAC |
| 3631 | GGACCUACACACAACAGCA |
| 3632 | GGGACCUACACACAACAGC |
| 3633 | GGGGACCUACACACAACAG |
| 3634 | AGGGGACCUACACACAACA |
| 3635 | CAGGGGACCUACACACAAC |
| 3636 | CCAGGGGACCUACACACAA |
| 3637 | CCCAGGGGACCUACACACA |
| 3638 | CCCCAGGGGACCUACACAC |
| 3639 | UCCCCAGGGGACCUACACA |
| 3640 | GUCCCCAGGGGACCUACAC |
| 3641 | UGUCCCCAGGGGACCUACA |
| 3642 | GUGUCCCCAGGGGACCUAC |
| 3643 | UGUGUCCCCAGGGGACCUA |
| 3644 | UUGUGUCCCCAGGGGACCU |
| 3645 | CUUGUGUCCCCAGGGGACC |
| 3646 | GCUUGUGUCCCCAGGGGAC |
| 3647 | UGCUUGUGUCCCCAGGGGA |
| 3648 | CUGCUUGUGUCCCCAGGGG |
| 3649 | CCUGCUUGUGUCCCCAGGG |
| 3650 | GCCUGCUUGUGUCCCCAGG |
| 3651 | CGCCUGCUUGUGUCCCCAG |
| 3652 | GCGCCUGCUUGUGUCCCCA |
| 3653 | GGCGCCUGCUUGUGUCCCC |
| 3654 | UGGCGCCUGCUUGUGUCCC |
| 3655 | UUGGCGCCUGCUUGUGUCC |
| 3656 | AUUGGCGCCUGCUUGUGUC |
| 3657 | CAUUGGCGCCUGCUUGUGU |
| 3658 | CCAUUGGCGCCUGCUUGUG |
| 3659 | ACCAUUGGCGCCUGCUUGU |
| 3660 | UACCAUUGGCGCCUGCUUG |
| 3661 | AUACCAUUGGCGCCUGCUU |
| 3662 | GAUACCAUUGGCGCCUGCU |
| 3663 | AGAUACCAUUGGCGCCUGC |
| 3664 | CAGAUACCAUUGGCGCCUG |
| 3665 | CCAGAUACCAUUGGCGCCU |
| 3666 | CCCAGAUACCAUUGGCGCC |
| 3667 | GCCCAGAUACCAUUGGCGC |
| 3668 | CGCCCAGAUACCAUUGGCG |
| 3669 | CCGCCCAGAUACCAUUGGC |
| 3670 | UCCGCCCAGAUACCAUUGG |
| 3671 | CUCCGCCCAGAUACCAUUG |
| 3672 | GCUCCGCCCAGAUACCAUU |
| 3673 | AGCUCCGCCCAGAUACCAU |
| 3674 | GAGCUCCGCCCAGAUACCA |
| 3675 | UGAGCUCCGCCCAGAUACC |
| 3676 | GUGAGCUCCGCCCAGAUAC |
| 3677 | UGUGAGCUCCGCCCAGAUA |
| 3678 | CUGUGAGCUCCGCCCAGAU |
| 3679 | UCUGUGAGCUCCGCCCAGA |
| 3680 | CUCUGUGAGCUCCGCCCAG |
| 3681 | ACUCUGUGAGCUCCGCCCA |
| 3682 | AACUCUGUGAGCUCCGCCC |
| 3683 | GAACUCUGUGAGCUCCGCC |
| 3684 | AGAACUCUGUGAGCUCCGC |
| 3685 | AAGAACUCUGUGAGCUCCG |
| 3686 | CAAGAACUCUGUGAGCUCC |
| 3687 | CCAAGAACUCUGUGAGCUC |
| 3688 | UCCAAGAACUCUGUGAGCU |
| 3689 | UUCCAAGAACUCUGUGAGC |
| 3690 | AUUCCAAGAACUCUGUGAG |
| 3691 | UAUUCCAAGAACUCUGUGA |
| 3692 | UUAUUCCAAGAACUCUGUG |
| 3693 | UUUAUUCCAAGAACUCUGU |
| 3694 | UUUUAUUCCAAGAACUCUG |
| 3695 | CUUUUAUUCCAAGAACUCU |
| 3696 | GCUUUUAUUCCAAGAACUC |
| 3697 | UGCUUUUAUUCCAAGAACU |
| 3698 | UUGCUUUUAUUCCAAGAAC |
| 3699 | GUUGCUUUUAUUCCAAGAA |
| 3700 | GGUUGCUUUUAUUCCAAGA |
| 3701 | AGGUUGCUUUUAUUCCAAG |
| 3702 | GAGGUUGCUUUUAUUCCAA |
| 3703 | UGAGGUUGCUUUUAUUCCA |
| 3704 | CUGAGGUUGCUUUUAUUCC |
| 3705 | UCUGAGGUUGCUUUUAUUC |
| 3706 | UUCUGAGGUUGCUUUUAUU |
| 3707 | GUUCUGAGGUUGCUUUUAU |
| 3708 | UGUUCUGAGGUUGCUUUUA |
| 3709 | AAGTGTTCTGAGGTTGCTTT |
| 3710 | AGTGTTCTGAGGTTGCTTTT |
| 3711 | GTGTTCTGAGGTTGCTTTTA |
| 3712 | TGTTCTGAGGTTGCTTTTAT |
| 3713 | GTTCTGAGGTTGCTTTTATT |
| 3714 | TTCTGAGGTTGCTTTTATTC |
| 3715 | TCTGAGGTTGCTTTTATTCC |
| 3716 | CTGAGGTTGCTTTTATTCCA |
| 3717 | TGAGGTTGCTTTTATTCCAA |
| 3718 | GAGGTTGCTTTTATTCCAAG |
| 3719 | AGGTTGCTTTTATTCCAAGA |
| 3720 | GGTTGCTTTTATTCCAAGAA |
| 3721 | GTTGCTTTTATTCCAAGAAC |
| 3722 | TTGCTTTTATTCCAAGAACT |
| 3723 | TGCTTTTATTCCAAGAACTC |
| 3724 | GCTTTTATTCCAAGAACTCT |
| 3725 | CTTTTATTCCAAGAACTCTG |
| 3726 | TTTTATTCCAAGAACTCTGT |
| 3727 | TTTATTCCAAGAACTCTGTG |
| 3728 | TTATTCCAAGAACTCTGTGA |
| 3729 | TATTCCAAGAACTCTGTGAG |
| 3730 | ATTCCAAGAACTCTGTGAGC |
| 3731 | TTCCAAGAACTCTGTGAGCT |
| 3732 | TCCAAGAACTCTGTGAGCTC |
| 3733 | CCAAGAACTCTGTGAGCTCC |
| 3734 | CAAGAACTCTGTGAGCTCCG |
| 3735 | AAGAACTCTGTGAGCTCCGC |
| 3736 | AGAACTCTGTGAGCTCCGCC |
| 3737 | GAACTCTGTGAGCTCCGCCC |
| 3738 | AACTCTGTGAGCTCCGCCCA |
| 3739 | ACTCTGTGAGCTCCGCCCAG |
| 3740 | CTCTGTGAGCTCCGCCCAGA |
| 3741 | TCTGTGAGCTCCGCCCAGAT |
| 3742 | CTGTGAGCTCCGCCCAGATA |
| 3743 | TGTGAGCTCCGCCCAGATAC |
| 3744 | GTGAGCTCCGCCCAGATACC |
| 3745 | TGAGCTCCGCCCAGATACCA |
| 3746 | GAGCTCCGCCCAGATACCAT |
| 3747 | AGCTCCGCCCAGATACCATT |
| 3748 | GCTCCGCCCAGATACCATTG |
| 3749 | CTCCGCCCAGATACCATTGG |
| 3750 | TCCGCCCAGATACCATTGGC |
| 3751 | CCGCCCAGATACCATTGGCG |
| 3752 | CGCCCAGATACCATTGGCGC |
| 3753 | GCCCAGATACCATTGGCGCC |
| 3754 | CCCAGATACCATTGGCGCCT |
| 3755 | CCAGATACCATTGGCGCCTG |
| 3756 | CAGATACCATTGGCGCCTGC |
| 3757 | AGATACCATTGGCGCCTGCT |
| 3758 | GATACCATTGGCGCCTGCTT |
| 3759 | ATACCATTGGCGCCTGCTTG |
| 3760 | TACCATTGGCGCCTGCTTGT |
| 3761 | ACCATTGGCGCCTGCTTGTG |
| 3762 | CCATTGGCGCCTGCTTGTGT |
| 3763 | CATTGGCGCCTGCTTGTGTC |
| 3764 | ATTGGCGCCTGCTTGTGTCC |
| 3765 | TTGGCGCCTGCTTGTGTCCC |
| 3766 | TGGCGCCTGCTTGTGTCCCC |
| 3767 | GGCGCCTGCTTGTGTCCCCA |
| 3768 | GCGCCTGCTTGTGTCCCCAG |
| 3769 | CGCCTGCTTGTGTCCCCAGG |
| 3770 | GCCTGCTTGTGTCCCCAGGG |
| 3771 | CCTGCTTGTGTCCCCAGGGG |
| 3772 | CTGCTTGTGTCCCCAGGGGA |
| 3773 | TGCTTGTGTCCCCAGGGGAC |
| 3774 | GCTTGTGTCCCCAGGGGACC |
| 3775 | CTTGTGTCCCCAGGGGACCT |
| 3776 | TTGTGTCCCCAGGGGACCTA |
| 3777 | TGTGTCCCCAGGGGACCTAC |
| 3778 | GTGTCCCCAGGGGACCTACA |
| 3779 | TGTCCCCAGGGGACCTACAC |
| 3780 | GTCCCCAGGGGACCTACACA |
| 3781 | TCCCCAGGGGACCTACACAC |
| 3782 | CCCCAGGGGACCTACACACA |
| 3783 | CCCAGGGGACCTACACACAA |
| 3784 | CCAGGGGACCTACACACAAC |
| 3785 | CAGGGGACCTACACACAACA |
| 3786 | AGGGGACCTACACACAACAG |
| 3787 | GGGGACCTACACACAACAGC |
| 3788 | GGGACCTACACACAACAGCA |
| 3789 | GGACCTACACACAACAGCAC |
| 3790 | GACCTACACACAACAGCACC |
| 3791 | ACCTACACACAACAGCACCA |
| 3792 | CCTACACACAACAGCACCAG |
| 3793 | CTACACACAACAGCACCAGC |
| 3794 | TACACACAACAGCACCAGCA |
| 3795 | ACACACAACAGCACCAGCAC |
| 3796 | CACACAACAGCACCAGCACC |
| 3797 | ACACAACAGCACCAGCACCA |
| 3798 | CACAACAGCACCAGCACCAT |
| 3799 | ACAACAGCACCAGCACCATG |
| 3800 | CAACAGCACCAGCACCATGA |
| 3801 | AACAGCACCAGCACCATGAG |
| 3802 | ACAGCACCAGCACCATGAGG |
| 3803 | CAGCACCAGCACCATGAGGG |
| 3804 | AGCACCAGCACCATGAGGGC |
| 3805 | GCACCAGCACCATGAGGGCG |
| 3806 | CACCAGCACCATGAGGGCGC |
| 3807 | ACCAGCACCATGAGGGCGCT |
| 3808 | CCAGCACCATGAGGGCGCTC |
| 3809 | CAGCACCATGAGGGCGCTCT |
| 3810 | AGCACCATGAGGGCGCTCTC |
| 3811 | GCACCATGAGGGCGCTCTCG |
| 3812 | CACCATGAGGGCGCTCTCGA |
| 3813 | ACCATGAGGGCGCTCTCGAC |
| 3814 | CCATGAGGGCGCTCTCGACC |
| 3815 | CATGAGGGCGCTCTCGACCC |
| 3816 | ATGAGGGCGCTCTCGACCCA |
| 3817 | TGAGGGCGCTCTCGACCCAC |
| 3818 | GAGGGCGCTCTCGACCCACA |
| 3819 | AGGGCGCTCTCGACCCACAC |
| 3820 | GGGCGCTCTCGACCCACACA |
| 3821 | GGCGCTCTCGACCCACACAA |
| 3822 | GCGCTCTCGACCCACACAAG |
| 3823 | CGCTCTCGACCCACACAAGC |
| 3824 | GCTCTCGACCCACACAAGCC |
| 3825 | CTCTCGACCCACACAAGCCC |
| 3826 | TCTCGACCCACACAAGCCCT |
| 3827 | CTCGACCCACACAAGCCCTG |
| 3828 | TCGACCCACACAAGCCCTGG |
| 3829 | CGACCCACACAAGCCCTGGT |
| 3830 | GACCCACACAAGCCCTGGTC |
| 3831 | ACCCACACAAGCCCTGGTCC |
| 3832 | CCCACACAAGCCCTGGTCCC |
| 3833 | CCACACAAGCCCTGGTCCCC |
| 3834 | CACACAAGCCCTGGTCCCCG |
| 3835 | ACACAAGCCCTGGTCCCCGT |
| 3836 | CACAAGCCCTGGTCCCCGTC |
| 3837 | ACAAGCCCTGGTCCCCGTCA |
| 3838 | CAAGCCCTGGTCCCCGTCAG |
| 3839 | AAGCCCTGGTCCCCGTCAGT |
| 3840 | AGCCCTGGTCCCCGTCAGTC |
| 3841 | GCCCTGGTCCCCGTCAGTCA |
| 3842 | CCCTGGTCCCCGTCAGTCAA |
| 3843 | CCTGGTCCCCGTCAGTCAAT |
| 3844 | CTGGTCCCCGTCAGTCAATG |
| 3845 | TGGTCCCCGTCAGTCAATGT |
| 3846 | GGTCCCCGTCAGTCAATGTG |
| 3847 | GTCCCCGTCAGTCAATGTGA |
| 3848 | TCCCCGTCAGTCAATGTGAC |
| 3849 | CCCCGTCAGTCAATGTGACT |
| 3850 | CCCGTCAGTCAATGTGACTG |
| 3851 | CCGTCAGTCAATGTGACTGA |
| 3852 | CGTCAGTCAATGTGACTGAG |
| 3853 | GTCAGTCAATGTGACTGAGT |
| 3854 | TCAGTCAATGTGACTGAGTC |
| 3855 | CAGTCAATGTGACTGAGTCC |
| 3856 | AGTCAATGTGACTGAGTCCG |
| 3857 | GTCAATGTGACTGAGTCCGC |
| 3858 | TCAATGTGACTGAGTCCGCC |
| 3859 | CAATGTGACTGAGTCCGCCA |
| 3860 | AATGTGACTGAGTCCGCCAT |
| 3861 | ATGTGACTGAGTCCGCCATT |
| 3862 | TGTGACTGAGTCCGCCATTG |
| 3863 | GTGACTGAGTCCGCCATTGA |
| 3864 | TGACTGAGTCCGCCATTGAG |
| 3865 | GACTGAGTCCGCCATTGAGG |
| 3866 | ACTGAGTCCGCCATTGAGGC |
| 3867 | CTGAGTCCGCCATTGAGGCC |
| 3868 | TGAGTCCGCCATTGAGGCCA |
| 3869 | GAGTCCGCCATTGAGGCCAG |
| 3870 | AGTCCGCCATTGAGGCCAGT |
| 3871 | GTCCGCCATTGAGGCCAGTC |
| 3872 | TCCGCCATTGAGGCCAGTCT |
| 3873 | CCGCCATTGAGGCCAGTCTG |
| 3874 | CGCCATTGAGGCCAGTCTGG |
| 3875 | GCCATTGAGGCCAGTCTGGC |
| 3876 | CCATTGAGGCCAGTCTGGCT |
| 3877 | CATTGAGGCCAGTCTGGCTG |
| 3878 | ATTGAGGCCAGTCTGGCTGG |
| 3879 | TTGAGGCCAGTCTGGCTGGC |
| 3880 | TGAGGCCAGTCTGGCTGGCC |
| 3881 | GAGGCCAGTCTGGCTGGCCC |
| 3882 | AGGCCAGTCTGGCTGGCCCC |
| 3883 | GGCCAGTCTGGCTGGCCCCA |
| 3884 | GCCAGTCTGGCTGGCCCCAA |
| 3885 | CCAGTCTGGCTGGCCCCAAG |
| 3886 | CAGTCTGGCTGGCCCCAAGT |
| 3887 | AGTCTGGCTGGCCCCAAGTG |
| 3888 | GTCTGGCTGGCCCCAAGTGG |
| 3889 | TCTGGCTGGCCCCAAGTGGT |
| 3890 | CTGGCTGGCCCCAAGTGGTC |
| 3891 | TGGCTGGCCCCAAGTGGTCC |
| 3892 | GGCTGGCCCCAAGTGGTCCC |
| 3893 | GCTGGCCCCAAGTGGTCCCT |
| 3894 | CTGGCCCCAAGTGGTCCCTC |
| 3895 | TGGCCCCAAGTGGTCCCTCT |
| 3896 | GGCCCCAAGTGGTCCCTCTG |
| 3897 | GCCCCAAGTGGTCCCTCTGA |
| 3898 | CCCCAAGTGGTCCCTCTGAG |
| 3899 | CCCAAGTGGTCCCTCTGAGT |
| 3900 | CCAAGTGGTCCCTCTGAGTC |
| 3901 | CAAGTGGTCCCTCTGAGTCC |
| 3902 | AAGTGGTCCCTCTGAGTCCC |
| 3903 | AGTGGTCCCTCTGAGTCCCC |
| 3904 | GTGGTCCCTCTGAGTCCCCA |
| 3905 | TGGTCCCTCTGAGTCCCCAA |
| 3906 | GGTCCCTCTGAGTCCCCAAC |
| 3907 | GTCCCTCTGAGTCCCCAACT |
| 3908 | TCCCTCTGAGTCCCCAACTC |
| 3909 | CCCTCTGAGTCCCCAACTCC |
| 3910 | CCTCTGAGTCCCCAACTCCC |
| 3911 | CTCTGAGTCCCCAACTCCCT |
| 3912 | TCTGAGTCCCCAACTCCCTG |
| 3913 | CTGAGTCCCCAACTCCCTGG |
| 3914 | TGAGTCCCCAACTCCCTGGC |
| 3915 | GAGTCCCCAACTCCCTGGCC |
| 3916 | AGTCCCCAACTCCCTGGCCA |
| 3917 | GTCCCCAACTCCCTGGCCAG |
| 3918 | TCCCCAACTCCCTGGCCAGC |
| 3919 | CCCCAACTCCCTGGCCAGCA |
| 3920 | CCCAACTCCCTGGCCAGCAA |
| 3921 | CCAACTCCCTGGCCAGCAAG |
| 3922 | CAACTCCCTGGCCAGCAAGG |
| 3923 | AACTCCCTGGCCAGCAAGGA |
| 3924 | ACTCCCTGGCCAGCAAGGAG |
| 3925 | CTCCCTGGCCAGCAAGGAGT |
| 3926 | TCCCTGGCCAGCAAGGAGTG |
| 3927 | CCCTGGCCAGCAAGGAGTGA |
| 3928 | CCTGGCCAGCAAGGAGTGAA |
| 3929 | CTGGCCAGCAAGGAGTGAAG |
| 3930 | TGGCCAGCAAGGAGTGAAGC |
| 3931 | GGCCAGCAAGGAGTGAAGCT |
| 3932 | GCCAGCAAGGAGTGAAGCTC |
| 3933 | CCAGCAAGGAGTGAAGCTCC |
| 3934 | CAGCAAGGAGTGAAGCTCCA |
| 3935 | AGCAAGGAGTGAAGCTCCAT |
| 3936 | GCAAGGAGTGAAGCTCCATG |
| 3937 | CAAGGAGTGAAGCTCCATGC |
| 3938 | AAGGAGTGAAGCTCCATGCC |
| 3939 | AGGAGTGAAGCTCCATGCCC |
| 3940 | GGAGTGAAGCTCCATGCCCC |
| 3941 | GAGTGAAGCTCCATGCCCCT |
| 3942 | AGTGAAGCTCCATGCCCCTT |
| 3943 | GTGAAGCTCCATGCCCCTTG |
| 3944 | TGAAGCTCCATGCCCCTTGG |
| 3945 | GAAGCTCCATGCCCCTTGGT |
| 3946 | AAGCTCCATGCCCCTTGGTC |
| 3947 | AGCTCCATGCCCCTTGGTCC |
| 3948 | GCTCCATGCCCCTTGGTCCA |
| 3949 | CTCCATGCCCCTTGGTCCAC |
| 3950 | TCCATGCCCCTTGGTCCACG |
| 3951 | CCATGCCCCTTGGTCCACGC |
| 3952 | CATGCCCCTTGGTCCACGCC |
| 3953 | ATGCCCCTTGGTCCACGCCT |
| 3954 | TGCCCCTTGGTCCACGCCTC |
| 3955 | GCCCCTTGGTCCACGCCTCT |
| 3956 | CCCCTTGGTCCACGCCTCTA |
| 3957 | CCCTTGGTCCACGCCTCTAG |
| 3958 | CCTTGGTCCACGCCTCTAGA |
| 3959 | CTTGGTCCACGCCTCTAGAG |
| 3960 | TTGGTCCACGCCTCTAGAGT |
| 3961 | TGGTCCACGCCTCTAGAGTC |
| 3962 | GGTCCACGCCTCTAGAGTCT |
| 3963 | GTCCACGCCTCTAGAGTCTG |
| 3964 | TCCACGCCTCTAGAGTCTGA |
| 3965 | CCACGCCTCTAGAGTCTGAG |
| 3966 | CACGCCTCTAGAGTCTGAGC |
| 3967 | ACGCCTCTAGAGTCTGAGCA |
| 3968 | CGCCTCTAGAGTCTGAGCAT |
| 3969 | GCCTCTAGAGTCTGAGCATA |
| 3970 | CCTCTAGAGTCTGAGCATAT |
| 3971 | CTCTAGAGTCTGAGCATATC |
| 3972 | TCTAGAGTCTGAGCATATCC |
| 3973 | CTAGAGTCTGAGCATATCCT |
| 3974 | TAGAGTCTGAGCATATCCTG |
| 3975 | AGAGTCTGAGCATATCCTGC |
| 3976 | GAGTCTGAGCATATCCTGCA |
| 3977 | AGTCTGAGCATATCCTGCAG |
| 3978 | GTCTGAGCATATCCTGCAGC |
| 3979 | TCTGAGCATATCCTGCAGCC |
| 3980 | CTGAGCATATCCTGCAGCCT |
| 3981 | TGAGCATATCCTGCAGCCTC |
| 3982 | GAGCATATCCTGCAGCCTCG |
| 3983 | AGCATATCCTGCAGCCTCGA |
| 3984 | GCATATCCTGCAGCCTCGAT |
| 3985 | CATATCCTGCAGCCTCGATC |
| 3986 | ATATCCTGCAGCCTCGATCT |
| 3987 | TATCCTGCAGCCTCGATCTC |
| 3988 | ATCCTGCAGCCTCGATCTCA |
| 3989 | TCCTGCAGCCTCGATCTCAG |
| 3990 | CCTGCAGCCTCGATCTCAGG |
| 3991 | CTGCAGCCTCGATCTCAGGA |
| 3992 | TGCAGCCTCGATCTCAGGAG |
| 3993 | GCAGCCTCGATCTCAGGAGG |
| 3994 | CAGCCTCGATCTCAGGAGGC |
| 3995 | AGCCTCGATCTCAGGAGGCA |
| 3996 | GCCTCGATCTCAGGAGGCAA |
| 3997 | CCTCGATCTCAGGAGGCAAC |
| 3998 | CTCGATCTCAGGAGGCAACG |
| 3999 | TCGATCTCAGGAGGCAACGC |
| 4000 | CGATCTCAGGAGGCAACGCA |
| 4001 | GATCTCAGGAGGCAACGCAT |
| 4002 | ATCTCAGGAGGCAACGCATG |
| 4003 | TCTCAGGAGGCAACGCATGC |
| 4004 | CTCAGGAGGCAACGCATGCA |
| 4005 | TCAGGAGGCAACGCATGCAG |
| 4006 | CAGGAGGCAACGCATGCAGC |
| 4007 | AGGAGGCAACGCATGCAGCC |
| 4008 | GGAGGCAACGCATGCAGCCC |
| 4009 | GAGGCAACGCATGCAGCCCC |
| 4010 | AGGCAACGCATGCAGCCCCC |
| 4011 | GGCAACGCATGCAGCCCCCC |
| 4012 | GCAACGCATGCAGCCCCCCT |
| 4013 | CAACGCATGCAGCCCCCCTG |
| 4014 | AACGCATGCAGCCCCCCTGC |
| 4015 | ACGCATGCAGCCCCCCTGCA |
| 4016 | CGCATGCAGCCCCCCTGCAC |
| 4017 | GCATGCAGCCCCCCTGCACT |
| 4018 | CATGCAGCCCCCCTGCACTC |
| 4019 | ATGCAGCCCCCCTGCACTCA |
| 4020 | TGCAGCCCCCCTGCACTCAG |
| 4021 | GCAGCCCCCCTGCACTCAGA |
| 4022 | CAGCCCCCCTGCACTCAGAA |
| 4023 | AGCCCCCCTGCACTCAGAAA |
| 4024 | GCCCCCCTGCACTCAGAAAG |
| 4025 | CCCCCCTGCACTCAGAAAGG |
| 4026 | CCCCCTGCACTCAGAAAGGG |
| 4027 | CCCCTGCACTCAGAAAGGGG |
| 4028 | CCCTGCACTCAGAAAGGGGG |
| 4029 | CCTGCACTCAGAAAGGGGGC |
| 4030 | CTGCACTCAGAAAGGGGGCT |
| 4031 | TGCACTCAGAAAGGGGGCTT |
| 4032 | GCACTCAGAAAGGGGGCTTC |
| 4033 | CACTCAGAAAGGGGGCTTCT |
| 4034 | ACTCAGAAAGGGGGCTTCTC |
| 4035 | CTCAGAAAGGGGGCTTCTCC |
| 4036 | TCAGAAAGGGGGCTTCTCCA |
| 4037 | CAGAAAGGGGGCTTCTCCAG |
| 4038 | AGAAAGGGGGCTTCTCCAGT |
| 4039 | GAAAGGGGGCTTCTCCAGTC |
| 4040 | AAAGGGGGCTTCTCCAGTCG |
| 4041 | AAGGGGGCTTCTCCAGTCGT |
| 4042 | AGGGGGCTTCTCCAGTCGTG |
| 4043 | GGGGGCTTCTCCAGTCGTGG |
| 4044 | GGGGCTTCTCCAGTCGTGGT |
| 4045 | GGGCTTCTCCAGTCGTGGTC |
| 4046 | GGCTTCTCCAGTCGTGGTCT |
| 4047 | GCTTCTCCAGTCGTGGTCTT |
| 4048 | CTTCTCCAGTCGTGGTCTTC |
| 4049 | TTCTCCAGTCGTGGTCTTCT |
| 4050 | TCTCCAGTCGTGGTCTTCTT |
| 4051 | CTCCAGTCGTGGTCTTCTTC |
| 4052 | TCCAGTCGTGGTCTTCTTCT |
| 4053 | CCAGTCGTGGTCTTCTTCTC |
| 4054 | CAGTCGTGGTCTTCTTCTCT |
| 4055 | AGTCGTGGTCTTCTTCTCTG |
| 4056 | GTCGTGGTCTTCTTCTCTGT |
| 4057 | TCGTGGTCTTCTTCTCTGTC |
| 4058 | CGTGGTCTTCTTCTCTGTCC |
| 4059 | GTGGTCTTCTTCTCTGTCCA |
| 4060 | TGGTCTTCTTCTCTGTCCAC |
| 4061 | GGTCTTCTTCTCTGTCCACA |
| 4062 | GTCTTCTTCTCTGTCCACAA |
| 4063 | TCTTCTTCTCTGTCCACAAG |
| 4064 | CTTCTTCTCTGTCCACAAGT |
| 4065 | TTCTTCTCTGTCCACAAGTT |
| 4066 | TCTTCTCTGTCCACAAGTTT |
| 4067 | CTTCTCTGTCCACAAGTTTC |
| 4068 | TTCTCTGTCCACAAGTTTCC |
| 4069 | TCTCTGTCCACAAGTTTCCA |
| 4070 | CTCTGTCCACAAGTTTCCAG |
| 4071 | TCTGTCCACAAGTTTCCAGA |
| 4072 | CTGTCCACAAGTTTCCAGAT |
| 4073 | TGTCCACAAGTTTCCAGATG |
| 4074 | GTCCACAAGTTTCCAGATGG |
| 4075 | TCCACAAGTTTCCAGATGGC |
| 4076 | CCACAAGTTTCCAGATGGCC |
| 4077 | CACAAGTTTCCAGATGGCCC |
| 4078 | ACAAGTTTCCAGATGGCCCC |
| 4079 | CAAGTTTCCAGATGGCCCCT |
| 4080 | AAGTTTCCAGATGGCCCCTC |
| 4081 | AGTTTCCAGATGGCCCCTCC |
| 4082 | GTTTCCAGATGGCCCCTCCT |
| 4083 | TTTCCAGATGGCCCCTCCTT |
| 4084 | TTCCAGATGGCCCCTCCTTG |
| 4085 | TCCAGATGGCCCCTCCTTGG |
| 4086 | CCAGATGGCCCCTCCTTGGA |
| 4087 | CAGATGGCCCCTCCTTGGAG |
| 4088 | AGATGGCCCCTCCTTGGAGC |
| 4089 | GATGGCCCCTCCTTGGAGCC |
| 4090 | ATGGCCCCTCCTTGGAGCCC |
| 4091 | TGGCCCCTCCTTGGAGCCCC |
| 4092 | GGCCCCTCCTTGGAGCCCCT |
| 4093 | GCCCCTCCTTGGAGCCCCTG |
| 4094 | CCCCTCCTTGGAGCCCCTGC |
| 4095 | CCCTCCTTGGAGCCCCTGCC |
| 4096 | CCTCCTTGGAGCCCCTGCCC |
| 4097 | CTCCTTGGAGCCCCTGCCCA |
| 4098 | TCCTTGGAGCCCCTGCCCAG |
| 4099 | CCTTGGAGCCCCTGCCCAGG |
| 4100 | CTTGGAGCCCCTGCCCAGGC |
| 4101 | TTGGAGCCCCTGCCCAGGCA |
| 4102 | TGGAGCCCCTGCCCAGGCAG |
| 4103 | GGAGCCCCTGCCCAGGCAGG |
| 4104 | GAGCCCCTGCCCAGGCAGGG |
| 4105 | AGCCCCTGCCCAGGCAGGGA |
| 4106 | GCCCCTGCCCAGGCAGGGAA |
| 4107 | CCCCTGCCCAGGCAGGGAAC |
| 4108 | CCCTGCCCAGGCAGGGAACG |
| 4109 | CCTGCCCAGGCAGGGAACGG |
| 4110 | CTGCCCAGGCAGGGAACGGC |
| 4111 | TGCCCAGGCAGGGAACGGCC |
| 4112 | GCCCAGGCAGGGAACGGCCA |
| 4113 | CCCAGGCAGGGAACGGCCAC |
| 4114 | CCAGGCAGGGAACGGCCACA |
| 4115 | CAGGCAGGGAACGGCCACAT |
| 4116 | AGGCAGGGAACGGCCACATC |
| 4117 | GGCAGGGAACGGCCACATCC |
| 4118 | GCAGGGAACGGCCACATCCT |
| 4119 | CAGGGAACGGCCACATCCTC |
| 4120 | AGGGAACGGCCACATCCTCG |
| 4121 | GGGAACGGCCACATCCTCGG |
| 4122 | GGAACGGCCACATCCTCGGG |
| 4123 | GAACGGCCACATCCTCGGGC |
| 4124 | AACGGCCACATCCTCGGGCA |
| 4125 | ACGGCCACATCCTCGGGCAG |
| 4126 | CGGCCACATCCTCGGGCAGA |
| 4127 | GGCCACATCCTCGGGCAGAG |
| 4128 | GCCACATCCTCGGGCAGAGC |
| 4129 | CCACATCCTCGGGCAGAGCC |
| 4130 | CACATCCTCGGGCAGAGCCA |
| 4131 | ACATCCTCGGGCAGAGCCAA |
| 4132 | CATCCTCGGGCAGAGCCAAG |
| 4133 | ATCCTCGGGCAGAGCCAAGA |
| 4134 | TCCTCGGGCAGAGCCAAGAG |
| 4135 | CCTCGGGCAGAGCCAAGAGT |
| 4136 | CTCGGGCAGAGCCAAGAGTC |
| 4137 | TCGGGCAGAGCCAAGAGTCA |
| 4138 | CGGGCAGAGCCAAGAGTCAC |
| 4139 | GGGCAGAGCCAAGAGTCACC |
| 4140 | GGCAGAGCCAAGAGTCACCG |
| 4141 | GCAGAGCCAAGAGTCACCGT |
| 4142 | CAGAGCCAAGAGTCACCGTC |
| 4143 | AGAGCCAAGAGTCACCGTCT |
| 4144 | GAGCCAAGAGTCACCGTCTT |
| 4145 | AGCCAAGAGTCACCGTCTTT |
| 4146 | GCCAAGAGTCACCGTCTTTC |
| 4147 | CCAAGAGTCACCGTCTTTCG |
| 4148 | CAAGAGTCACCGTCTTTCGT |
| 4149 | AAGAGTCACCGTCTTTCGTG |
| 4150 | AGAGTCACCGTCTTTCGTGG |
| 4151 | GAGTCACCGTCTTTCGTGGG |
| 4152 | AGTCACCGTCTTTCGTGGGC |
| 4153 | GTCACCGTCTTTCGTGGGCC |
| 4154 | TCACCGTCTTTCGTGGGCCT |
| 4155 | CACCGTCTTTCGTGGGCCTG |
| 4156 | ACCGTCTTTCGTGGGCCTGG |
| 4157 | CCGTCTTTCGTGGGCCTGGG |
| 4158 | CGTCTTTCGTGGGCCTGGGA |
| 4159 | GTCTTTCGTGGGCCTGGGAC |
| 4160 | TCTTTCGTGGGCCTGGGACC |
| 4161 | CTTTCGTGGGCCTGGGACCA |
| 4162 | TTTCGTGGGCCTGGGACCAG |
| 4163 | TTCGTGGGCCTGGGACCAGG |
| 4164 | TCGTGGGCCTGGGACCAGGC |
| 4165 | CGTGGGCCTGGGACCAGGCC |
| 4166 | GTGGGCCTGGGACCAGGCCC |
| 4167 | TGGGCCTGGGACCAGGCCCA |
| 4168 | GGGCCTGGGACCAGGCCCAG |
| 4169 | GGCCTGGGACCAGGCCCAGC |
| 4170 | GCCTGGGACCAGGCCCAGCC |
| 4171 | CCTGGGACCAGGCCCAGCCA |
| 4172 | CTGGGACCAGGCCCAGCCAG |
| 4173 | TGGGACCAGGCCCAGCCAGG |
| 4174 | GGGACCAGGCCCAGCCAGGA |
| 4175 | GGACCAGGCCCAGCCAGGAC |
| 4176 | GACCAGGCCCAGCCAGGACG |
| 4177 | ACCAGGCCCAGCCAGGACGC |
| 4178 | CCAGGCCCAGCCAGGACGCT |
| 4179 | CAGGCCCAGCCAGGACGCTA |
| 4180 | AGGCCCAGCCAGGACGCTAG |
| 4181 | GGCCCAGCCAGGACGCTAGG |
| 4182 | GCCCAGCCAGGACGCTAGGA |
| 4183 | CCCAGCCAGGACGCTAGGAG |
| 4184 | CCAGCCAGGACGCTAGGAGG |
| 4185 | CAGCCAGGACGCTAGGAGGC |
| 4186 | AGCCAGGACGCTAGGAGGCT |
| 4187 | GCCAGGACGCTAGGAGGCTG |
| 4188 | CCAGGACGCTAGGAGGCTGC |
| 4189 | CAGGACGCTAGGAGGCTGCC |
| 4190 | AGGACGCTAGGAGGCTGCCT |
| 4191 | GGACGCTAGGAGGCTGCCTC |
| 4192 | GACGCTAGGAGGCTGCCTCT |
| 4193 | ACGCTAGGAGGCTGCCTCTG |
| 4194 | CGCTAGGAGGCTGCCTCTGC |
| 4195 | GCTAGGAGGCTGCCTCTGCT |
| 4196 | CTAGGAGGCTGCCTCTGCTG |
| 4197 | TAGGAGGCTGCCTCTGCTGC |
| 4198 | AGGAGGCTGCCTCTGCTGCC |
| 4199 | GGAGGCTGCCTCTGCTGCCA |
| 4200 | GAGGCTGCCTCTGCTGCCAT |
| 4201 | AGGCTGCCTCTGCTGCCATG |
| 4202 | GGCTGCCTCTGCTGCCATGG |
| 4203 | GCTGCCTCTGCTGCCATGGG |
| 4204 | CTGCCTCTGCTGCCATGGGC |
| 4205 | TGCCTCTGCTGCCATGGGCT |
| 4206 | GCCTCTGCTGCCATGGGCTG |
| 4207 | CCTCTGCTGCCATGGGCTGG |
| 4208 | CTCTGCTGCCATGGGCTGGA |
| 4209 | TCTGCTGCCATGGGCTGGAT |
| 4210 | CTGCTGCCATGGGCTGGATC |
| 4211 | TGCTGCCATGGGCTGGATCA |
| 4212 | GCTGCCATGGGCTGGATCAA |
| 4213 | CTGCCATGGGCTGGATCAAC |
| 4214 | TGCCATGGGCTGGATCAACA |
| 4215 | GCCATGGGCTGGATCAACAT |
| 4216 | CCATGGGCTGGATCAACATG |
| 4217 | CATGGGCTGGATCAACATGG |
| 4218 | ATGGGCTGGATCAACATGGT |
| 4219 | TGGGCTGGATCAACATGGTG |
| 4220 | GGGCTGGATCAACATGGTGG |
| 4221 | GGCTGGATCAACATGGTGGT |
| 4222 | GCTGGATCAACATGGTGGTG |
| 4223 | CTGGATCAACATGGTGGTGG |
| 4224 | TGGATCAACATGGTGGTGGC |
| 4225 | GGATCAACATGGTGGTGGCC |
| 4226 | GATCAACATGGTGGTGGCCT |
| 4227 | ATCAACATGGTGGTGGCCTG |
| 4228 | TCAACATGGTGGTGGCCTGC |
| 4229 | CAACATGGTGGTGGCCTGCA |
| 4230 | AACATGGTGGTGGCCTGCAG |
| 4231 | ACATGGTGGTGGCCTGCAGC |
| 4232 | CATGGTGGTGGCCTGCAGCG |
| 4233 | ATGGTGGTGGCCTGCAGCGG |
| 4234 | TGGTGGTGGCCTGCAGCGGG |
| 4235 | GGTGGTGGCCTGCAGCGGGT |
| 4236 | GTGGTGGCCTGCAGCGGGTA |
| 4237 | TGGTGGCCTGCAGCGGGTAG |
| 4238 | GGTGGCCTGCAGCGGGTAGT |
| 4239 | GTGGCCTGCAGCGGGTAGTA |
| 4240 | TGGCCTGCAGCGGGTAGTAG |
| 4241 | GGCCTGCAGCGGGTAGTAGC |
| 4242 | GCCTGCAGCGGGTAGTAGCG |
| 4243 | CCTGCAGCGGGTAGTAGCGG |
| 4244 | CTGCAGCGGGTAGTAGCGGC |
| 4245 | TGCAGCGGGTAGTAGCGGCC |
| 4246 | GCAGCGGGTAGTAGCGGCCC |
| 4247 | CAGCGGGTAGTAGCGGCCCC |
| 4248 | AGCGGGTAGTAGCGGCCCCG |
| 4249 | GCGGGTAGTAGCGGCCCCGC |
| 4250 | CGGGTAGTAGCGGCCCCGCC |
| 4251 | GGGTAGTAGCGGCCCCGCCA |
| 4252 | GGTAGTAGCGGCCCCGCCAG |
| 4253 | GTAGTAGCGGCCCCGCCAGG |
| 4254 | TAGTAGCGGCCCCGCCAGGT |
| 4255 | AGTAGCGGCCCCGCCAGGTC |
| 4256 | GTAGCGGCCCCGCCAGGTCT |
| 4257 | TAGCGGCCCCGCCAGGTCTT |
| 4258 | AGCGGCCCCGCCAGGTCTTC |
| 4259 | GCGGCCCCGCCAGGTCTTCC |
| 4260 | CGGCCCCGCCAGGTCTTCCA |
| 4261 | GGCCCCGCCAGGTCTTCCAG |
| 4262 | GCCCCGCCAGGTCTTCCAGA |
| 4263 | CCCCGCCAGGTCTTCCAGAA |
| 4264 | CCCGCCAGGTCTTCCAGAAG |
| 4265 | CCGCCAGGTCTTCCAGAAGA |
| 4266 | CGCCAGGTCTTCCAGAAGAT |
| 4267 | GCCAGGTCTTCCAGAAGATT |
| 4268 | CCAGGTCTTCCAGAAGATTC |
| 4269 | CAGGTCTTCCAGAAGATTCC |
| 4270 | AGGTCTTCCAGAAGATTCCC |
| 4271 | GGTCTTCCAGAAGATTCCCT |
| 4272 | GTCTTCCAGAAGATTCCCTT |
| 4273 | TCTTCCAGAAGATTCCCTTC |
| 4274 | CTTCCAGAAGATTCCCTTCT |
| 4275 | TTCCAGAAGATTCCCTTCTT |
| 4276 | TCCAGAAGATTCCCTTCTTA |
| 4277 | CCAGAAGATTCCCTTCTTAA |
| 4278 | CAGAAGATTCCCTTCTTAAG |
| 4279 | AGAAGATTCCCTTCTTAAGC |
| 4280 | GAAGATTCCCTTCTTAAGCT |
| 4281 | AAGATTCCCTTCTTAAGCTT |
| 4282 | AGATTCCCTTCTTAAGCTTC |
| 4283 | GATTCCCTTCTTAAGCTTCT |
| 4284 | ATTCCCTTCTTAAGCTTCTG |
| 4285 | TTCCCTTCTTAAGCTTCTGC |
| 4286 | TCCCTTCTTAAGCTTCTGCC |
| 4287 | CCCTTCTTAAGCTTCTGCCG |
| 4288 | CCTTCTTAAGCTTCTGCCGC |
| 4289 | CTTCTTAAGCTTCTGCCGCT |
| 4290 | TTCTTAAGCTTCTGCCGCTG |
| 4291 | TCTTAAGCTTCTGCCGCTGC |
| 4292 | CTTAAGCTTCTGCCGCTGCT |
| 4293 | TTAAGCTTCTGCCGCTGCTG |
| 4294 | TAAGCTTCTGCCGCTGCTGT |
| 4295 | AAGCTTCTGCCGCTGCTGTG |
| 4296 | AGCTTCTGCCGCTGCTGTGG |
| 4297 | GCTTCTGCCGCTGCTGTGGG |
| 4298 | CTTCTGCCGCTGCTGTGGGA |
| 4299 | TTCTGCCGCTGCTGTGGGAT |
| 4300 | TCTGCCGCTGCTGTGGGATG |
| 4301 | CTGCCGCTGCTGTGGGATGG |
| 4302 | TGCCGCTGCTGTGGGATGGA |
| 4303 | GCCGCTGCTGTGGGATGGAG |
| 4304 | CCGCTGCTGTGGGATGGAGC |
| 4305 | CGCTGCTGTGGGATGGAGCG |
| 4306 | GCTGCTGTGGGATGGAGCGG |
| 4307 | CTGCTGTGGGATGGAGCGGA |
| 4308 | TGCTGTGGGATGGAGCGGAA |
| 4309 | GCTGTGGGATGGAGCGGAAG |
| 4310 | CTGTGGGATGGAGCGGAAGT |
| 4311 | TGTGGGATGGAGCGGAAGTA |
| 4312 | GTGGGATGGAGCGGAAGTAC |
| 4313 | TGGGATGGAGCGGAAGTACT |
| 4314 | GGGATGGAGCGGAAGTACTG |
| 4315 | GGATGGAGCGGAAGTACTGG |
| 4316 | GATGGAGCGGAAGTACTGGC |
| 4317 | ATGGAGCGGAAGTACTGGCC |
| 4318 | TGGAGCGGAAGTACTGGCCG |
| 4319 | GGAGCGGAAGTACTGGCCGT |
| 4320 | GAGCGGAAGTACTGGCCGTT |
| 4321 | AGCGGAAGTACTGGCCGTTG |
| 4322 | GCGGAAGTACTGGCCGTTGA |
| 4323 | CGGAAGTACTGGCCGTTGAG |
| 4324 | GGAAGTACTGGCCGTTGAGG |
| 4325 | GAAGTACTGGCCGTTGAGGT |
| 4326 | AAGTACTGGCCGTTGAGGTT |
| 4327 | AGTACTGGCCGTTGAGGTTG |
| 4328 | GTACTGGCCGTTGAGGTTGG |
| 4329 | TACTGGCCGTTGAGGTTGGA |
| 4330 | ACTGGCCGTTGAGGTTGGAA |
| 4331 | CTGGCCGTTGAGGTTGGAAT |
| 4332 | TGGCCGTTGAGGTTGGAATG |
| 4333 | GGCCGTTGAGGTTGGAATGG |
| 4334 | GCCGTTGAGGTTGGAATGGC |
| 4335 | CCGTTGAGGTTGGAATGGCT |
| 4336 | CGTTGAGGTTGGAATGGCTG |
| 4337 | GTTGAGGTTGGAATGGCTGC |
| 4338 | TTGAGGTTGGAATGGCTGCA |
| 4339 | TGAGGTTGGAATGGCTGCAG |
| 4340 | GAGGTTGGAATGGCTGCAGG |
| 4341 | AGGTTGGAATGGCTGCAGGT |
| 4342 | GGTTGGAATGGCTGCAGGTG |
| 4343 | GTTGGAATGGCTGCAGGTGC |
| 4344 | TTGGAATGGCTGCAGGTGCC |
| 4345 | TGGAATGGCTGCAGGTGCCA |
| 4346 | GGAATGGCTGCAGGTGCCAA |
| 4347 | GAATGGCTGCAGGTGCCAAA |
| 4348 | AATGGCTGCAGGTGCCAAAC |
| 4349 | ATGGCTGCAGGTGCCAAACC |
| 4350 | TGGCTGCAGGTGCCAAACCA |
| 4351 | GGCTGCAGGTGCCAAACCAC |
| 4352 | GCTGCAGGTGCCAAACCACC |
| 4353 | CTGCAGGTGCCAAACCACCA |
| 4354 | TGCAGGTGCCAAACCACCAG |
| 4355 | GCAGGTGCCAAACCACCAGC |
| 4356 | CAGGTGCCAAACCACCAGCC |
| 4357 | AGGTGCCAAACCACCAGCCT |
| 4358 | GGTGCCAAACCACCAGCCTC |
| 4359 | GTGCCAAACCACCAGCCTCC |
| 4360 | TGCCAAACCACCAGCCTCCT |
| 4361 | GCCAAACCACCAGCCTCCTG |
| 4362 | CCAAACCACCAGCCTCCTGC |
| 4363 | CAAACCACCAGCCTCCTGCC |
| 4364 | AAACCACCAGCCTCCTGCCG |
| 4365 | AACCACCAGCCTCCTGCCGG |
| 4366 | ACCACCAGCCTCCTGCCGGG |
| 4367 | CCACCAGCCTCCTGCCGGGG |
| 4368 | CACCAGCCTCCTGCCGGGGT |
| 4369 | ACCAGCCTCCTGCCGGGGTC |
| 4370 | CCAGCCTCCTGCCGGGGTCA |
| 4371 | CAGCCTCCTGCCGGGGTCAG |
| 4372 | AGCCTCCTGCCGGGGTCAGG |
| 4373 | GCCTCCTGCCGGGGTCAGGG |
| 4374 | CCTCCTGCCGGGGTCAGGGG |
| 4375 | CTCCTGCCGGGGTCAGGGGA |
| 4376 | TCCTGCCGGGGTCAGGGGAG |
| 4377 | CCTGCCGGGGTCAGGGGAGA |
| 4378 | CTGCCGGGGTCAGGGGAGAG |
| 4379 | TGCCGGGGTCAGGGGAGAGG |
| 4380 | GCCGGGGTCAGGGGAGAGGG |
| 4381 | CCGGGGTCAGGGGAGAGGGA |
| 4382 | CGGGGTCAGGGGAGAGGGAA |
| 4383 | GGGGTCAGGGGAGAGGGAAC |
| 4384 | GGGTCAGGGGAGAGGGAACA |
| 4385 | GGTCAGGGGAGAGGGAACAT |
| 4386 | GTCAGGGGAGAGGGAACATG |
| 4387 | TCAGGGGAGAGGGAACATGG |
| 4388 | CAGGGGAGAGGGAACATGGT |
| 4389 | AGGGGAGAGGGAACATGGTC |
| 4390 | GGGGAGAGGGAACATGGTCA |
| 4391 | GGGAGAGGGAACATGGTCAG |
| 4392 | GGAGAGGGAACATGGTCAGG |
| 4393 | GAGAGGGAACATGGTCAGGT |
| 4394 | AGAGGGAACATGGTCAGGTC |
| 4395 | GAGGGAACATGGTCAGGTCT |
| 4396 | AGGGAACATGGTCAGGTCTT |
| 4397 | GGGAACATGGTCAGGTCTTT |
| 4398 | GGAACATGGTCAGGTCTTTG |
| 4399 | GAACATGGTCAGGTCTTTGA |
| 4400 | AACATGGTCAGGTCTTTGAG |
| 4401 | ACATGGTCAGGTCTTTGAGC |
| 4402 | CATGGTCAGGTCTTTGAGCC |
| 4403 | ATGGTCAGGTCTTTGAGCCA |
| 4404 | TGGTCAGGTCTTTGAGCCAC |
| 4405 | GGTCAGGTCTTTGAGCCACC |
| 4406 | GTCAGGTCTTTGAGCCACCG |
| 4407 | TCAGGTCTTTGAGCCACCGA |
| 4408 | CAGGTCTTTGAGCCACCGAT |
| 4409 | AGGTCTTTGAGCCACCGATG |
| 4410 | GGTCTTTGAGCCACCGATGG |
| 4411 | GTCTTTGAGCCACCGATGGG |
| 4412 | TCTTTGAGCCACCGATGGGG |
| 4413 | CTTTGAGCCACCGATGGGGC |
| 4414 | TTTGAGCCACCGATGGGGCT |
| 4415 | TTGAGCCACCGATGGGGCTG |
| 4416 | TGAGCCACCGATGGGGCTGA |
| 4417 | GAGCCACCGATGGGGCTGAA |
| 4418 | AGCCACCGATGGGGCTGAAA |
| 4419 | GCCACCGATGGGGCTGAAAG |
| 4420 | CCACCGATGGGGCTGAAAGG |
| 4421 | CACCGATGGGGCTGAAAGGA |
| 4422 | ACCGATGGGGCTGAAAGGAG |
| 4423 | CCGATGGGGCTGAAAGGAGA |
| 4424 | CGATGGGGCTGAAAGGAGAT |
| 4425 | GATGGGGCTGAAAGGAGATA |
| 4426 | ATGGGGCTGAAAGGAGATAG |
| 4427 | TGGGGCTGAAAGGAGATAGG |
| 4428 | GGGGCTGAAAGGAGATAGGG |
| 4429 | GGGCTGAAAGGAGATAGGGA |
| 4430 | GGCTGAAAGGAGATAGGGAT |
| 4431 | GCTGAAAGGAGATAGGGATA |
| 4432 | CTGAAAGGAGATAGGGATAG |
| 4433 | TGAAAGGAGATAGGGATAGG |
| 4434 | GAAAGGAGATAGGGATAGGG |
| 4435 | AAAGGAGATAGGGATAGGGT |
| 4436 | AAGGAGATAGGGATAGGGTT |
| 4437 | AGGAGATAGGGATAGGGTTG |
| 4438 | GGAGATAGGGATAGGGTTGA |
| 4439 | GAGATAGGGATAGGGTTGAG |
| 4440 | AGATAGGGATAGGGTTGAGG |
| 4441 | GATAGGGATAGGGTTGAGGA |
| 4442 | ATAGGGATAGGGTTGAGGAT |
| 4443 | TAGGGATAGGGTTGAGGATG |
| 4444 | AGGGATAGGGTTGAGGATGA |
| 4445 | GGGATAGGGTTGAGGATGAG |
| 4446 | GGATAGGGTTGAGGATGAGG |
| 4447 | GATAGGGTTGAGGATGAGGC |
| 4448 | ATAGGGTTGAGGATGAGGCA |
| 4449 | TAGGGTTGAGGATGAGGCAG |
| 4450 | AGGGTTGAGGATGAGGCAGG |
| 4451 | GGGTTGAGGATGAGGCAGGT |
| 4452 | GGTTGAGGATGAGGCAGGTT |
| 4453 | GTTGAGGATGAGGCAGGTTG |
| 4454 | TTGAGGATGAGGCAGGTTGG |
| 4455 | TGAGGATGAGGCAGGTTGGG |
| 4456 | GAGGATGAGGCAGGTTGGGG |
| 4457 | AGGATGAGGCAGGTTGGGGA |
| 4458 | GGATGAGGCAGGTTGGGGAC |
| 4459 | GATGAGGCAGGTTGGGGACC |
| 4460 | ATGAGGCAGGTTGGGGACCA |
| 4461 | TGAGGCAGGTTGGGGACCAG |
| 4462 | GAGGCAGGTTGGGGACCAGG |
| 4463 | AGGCAGGTTGGGGACCAGGC |
| 4464 | GGCAGGTTGGGGACCAGGCT |
| 4465 | GCAGGTTGGGGACCAGGCTG |
| 4466 | CAGGTTGGGGACCAGGCTGG |
| 4467 | AGGTTGGGGACCAGGCTGGG |
| 4468 | GGTTGGGGACCAGGCTGGGC |
| 4469 | GTTGGGGACCAGGCTGGGCT |
| 4470 | TTGGGGACCAGGCTGGGCTT |
| 4471 | TGGGGACCAGGCTGGGCTTT |
| 4472 | GGGGACCAGGCTGGGCTTTG |
| 4473 | GGGACCAGGCTGGGCTTTGG |
| 4474 | GGACCAGGCTGGGCTTTGGA |
| 4475 | GACCAGGCTGGGCTTTGGAC |
| 4476 | ACCAGGCTGGGCTTTGGACT |
| 4477 | CCAGGCTGGGCTTTGGACTT |
| 4478 | CAGGCTGGGCTTTGGACTTG |
| 4479 | AGGCTGGGCTTTGGACTTGA |
| 4480 | GGCTGGGCTTTGGACTTGAC |
| 4481 | GCTGGGCTTTGGACTTGACT |
| 4482 | CTGGGCTTTGGACTTGACTT |
| 4483 | TGGGCTTTGGACTTGACTTT |
| 4484 | GGGCTTTGGACTTGACTTTT |
| 4485 | GGCTTTGGACTTGACTTTTT |
| 4486 | GCTTTGGACTTGACTTTTTT |
| 4487 | CTTTGGACTTGACTTTTTTT |
| 4488 | TTTGGACTTGACTTTTTTTT |
| 4489 | TTGGACTTGACTTTTTTTTT |
| 4490 | TGGACTTGACTTTTTTTTTT |
| 4491 | GGACTTGACTTTTTTTTTTT |
| 4492 | GACTTGACTTTTTTTTTTTT |
| 4493 | ACTTGACTTTTTTTTTTTTG |
| 4494 | CTTGACTTTTTTTTTTTTGA |
| 4495 | TTGACTTTTTTTTTTTTGAG |
| 4496 | TGACTTTTTTTTTTTTGAGA |
| 4497 | GACTTTTTTTTTTTTGAGAT |
| 4498 | ACTTTTTTTTTTTTGAGATT |
| 4499 | CTTTTTTTTTTTTGAGATTG |
| 4500 | TTTTTTTTTTTTGAGATTGA |
| 4501 | TTTTTTTTTTTGAGATTGAG |
| 4502 | TTTTTTTTTTGAGATTGAGT |
| 4503 | TTTTTTTTTGAGATTGAGTC |
| 4504 | TTTTTTTTGAGATTGAGTCT |
| 4505 | TTTTTTTGAGATTGAGTCTT |
| 4506 | TTTTTTGAGATTGAGTCTTA |
| 4507 | TTTTTGAGATTGAGTCTTAC |
| 4508 | TTTTGAGATTGAGTCTTACT |
| 4509 | TTTGAGATTGAGTCTTACTC |
| 4510 | TTGAGATTGAGTCTTACTCT |
| 4511 | TGAGATTGAGTCTTACTCTG |
| 4512 | GAGATTGAGTCTTACTCTGT |
| 4513 | AGATTGAGTCTTACTCTGTC |
| 4514 | GATTGAGTCTTACTCTGTCA |
| 4515 | ATTGAGTCTTACTCTGTCAC |
| 4516 | TTGAGTCTTACTCTGTCACC |
| 4517 | TGAGTCTTACTCTGTCACCC |
| 4518 | GAGTCTTACTCTGTCACCCA |
| 4519 | AGTCTTACTCTGTCACCCAG |
| 4520 | GTCTTACTCTGTCACCCAGG |
| 4521 | TCTTACTCTGTCACCCAGGC |
| 4522 | CTTACTCTGTCACCCAGGCT |
| 4523 | TTACTCTGTCACCCAGGCTG |
| 4524 | TACTCTGTCACCCAGGCTGG |
| 4525 | ACTCTGTCACCCAGGCTGGA |
| 4526 | CTCTGTCACCCAGGCTGGAG |
| 4527 | TCTGTCACCCAGGCTGGAGT |
| 4528 | CTGTCACCCAGGCTGGAGTG |
| 4529 | TGTCACCCAGGCTGGAGTGC |
| 4530 | GTCACCCAGGCTGGAGTGCA |
| 4531 | TCACCCAGGCTGGAGTGCAG |
| 4532 | CACCCAGGCTGGAGTGCAGT |
| 4533 | ACCCAGGCTGGAGTGCAGTG |
| 4534 | CCCAGGCTGGAGTGCAGTGG |
| 4535 | CCAGGCTGGAGTGCAGTGGT |
| 4536 | CAGGCTGGAGTGCAGTGGTG |
| 4537 | AGGCTGGAGTGCAGTGGTGC |
| 4538 | GGCTGGAGTGCAGTGGTGCG |
| 4539 | GCTGGAGTGCAGTGGTGCGA |
| 4540 | CTGGAGTGCAGTGGTGCGAT |
| 4541 | TGGAGTGCAGTGGTGCGATC |
| 4542 | GGAGTGCAGTGGTGCGATCT |
| 4543 | GAGTGCAGTGGTGCGATCTC |
| 4544 | AGTGCAGTGGTGCGATCTCA |
| 4545 | GTGCAGTGGTGCGATCTCAG |
| 4546 | TGCAGTGGTGCGATCTCAGC |
| 4547 | GCAGTGGTGCGATCTCAGCT |
| 4548 | CAGTGGTGCGATCTCAGCTC |
| 4549 | AGTGGTGCGATCTCAGCTCA |
| 4550 | GTGGTGCGATCTCAGCTCAC |
| 4551 | TGGTGCGATCTCAGCTCACT |
| 4552 | GGTGCGATCTCAGCTCACTG |
| 4553 | GTGCGATCTCAGCTCACTGC |
| 4554 | TGCGATCTCAGCTCACTGCA |
| 4555 | GCGATCTCAGCTCACTGCAA |
| 4556 | CGATCTCAGCTCACTGCAAC |
| 4557 | GATCTCAGCTCACTGCAACC |
| 4558 | ATCTCAGCTCACTGCAACCT |
| 4559 | TCTCAGCTCACTGCAACCTC |
| 4560 | CTCAGCTCACTGCAACCTCC |
| 4561 | TCAGCTCACTGCAACCTCCG |
| 4562 | CAGCTCACTGCAACCTCCGT |
| 4563 | AGCTCACTGCAACCTCCGTC |
| 4564 | GCTCACTGCAACCTCCGTCT |
| 4565 | CTCACTGCAACCTCCGTCTC |
| 4566 | TCACTGCAACCTCCGTCTCT |
| 4567 | CACTGCAACCTCCGTCTCTC |
| 4568 | ACTGCAACCTCCGTCTCTCA |
| 4569 | CTGCAACCTCCGTCTCTCAG |
| 4570 | TGCAACCTCCGTCTCTCAGG |
| 4571 | GCAACCTCCGTCTCTCAGGT |
| 4572 | CAACCTCCGTCTCTCAGGTT |
| 4573 | AACCTCCGTCTCTCAGGTTT |
| 4574 | ACCTCCGTCTCTCAGGTTTA |
| 4575 | CCTCCGTCTCTCAGGTTTAA |
| 4576 | CTCCGTCTCTCAGGTTTAAG |
| 4577 | TCCGTCTCTCAGGTTTAAGT |
| 4578 | CCGTCTCTCAGGTTTAAGTG |
| 4579 | CGTCTCTCAGGTTTAAGTGA |
| 4580 | GTCTCTCAGGTTTAAGTGAT |
| 4581 | TCTCTCAGGTTTAAGTGATT |
| 4582 | CTCTCAGGTTTAAGTGATTC |
| 4583 | TCTCAGGTTTAAGTGATTCT |
| 4584 | CTCAGGTTTAAGTGATTCTC |
| 4585 | TCAGGTTTAAGTGATTCTCC |
| 4586 | CAGGTTTAAGTGATTCTCCT |
| 4587 | AGGTTTAAGTGATTCTCCTC |
| 4588 | GGTTTAAGTGATTCTCCTCC |
| 4589 | GTTTAAGTGATTCTCCTCCC |
| 4590 | TTTAAGTGATTCTCCTCCCT |
| 4591 | TTAAGTGATTCTCCTCCCTC |
| 4592 | TAAGTGATTCTCCTCCCTCA |
| 4593 | AAGTGATTCTCCTCCCTCAG |
| 4594 | AGTGATTCTCCTCCCTCAGC |
| 4595 | GTGATTCTCCTCCCTCAGCC |
| 4596 | TGATTCTCCTCCCTCAGCCT |
| 4597 | GATTCTCCTCCCTCAGCCTC |
| 4598 | ATTCTCCTCCCTCAGCCTCC |
| 4599 | TTCTCCTCCCTCAGCCTCCC |
| 4600 | TCTCCTCCCTCAGCCTCCCG |
| 4601 | CTCCTCCCTCAGCCTCCCGA |
| 4602 | TCCTCCCTCAGCCTCCCGAG |
| 4603 | CCTCCCTCAGCCTCCCGAGT |
| 4604 | CTCCCTCAGCCTCCCGAGTA |
| 4605 | TCCCTCAGCCTCCCGAGTAG |
| 4606 | CCCTCAGCCTCCCGAGTAGC |
| 4607 | CCTCAGCCTCCCGAGTAGCT |
| 4608 | CTCAGCCTCCCGAGTAGCTG |
| 4609 | TCAGCCTCCCGAGTAGCTGG |
| 4610 | CAGCCTCCCGAGTAGCTGGG |
| 4611 | AGCCTCCCGAGTAGCTGGGA |
| 4612 | GCCTCCCGAGTAGCTGGGAT |
| 4613 | CCTCCCGAGTAGCTGGGATT |
| 4614 | CTCCCGAGTAGCTGGGATTA |
| 4615 | TCCCGAGTAGCTGGGATTAC |
| 4616 | CCCGAGTAGCTGGGATTACA |
| 4617 | CCGAGTAGCTGGGATTACAG |
| 4618 | CGAGTAGCTGGGATTACAGG |
| 4619 | GAGTAGCTGGGATTACAGGC |
| 4620 | AGTAGCTGGGATTACAGGCG |
| 4621 | GTAGCTGGGATTACAGGCGC |
| 4622 | TAGCTGGGATTACAGGCGCC |
| 4623 | AGCTGGGATTACAGGCGCCT |
| 4624 | GCTGGGATTACAGGCGCCTG |
| 4625 | CTGGGATTACAGGCGCCTGC |
| 4626 | TGGGATTACAGGCGCCTGCC |
| 4627 | GGGATTACAGGCGCCTGCCA |
| 4628 | GGATTACAGGCGCCTGCCAC |
| 4629 | GATTACAGGCGCCTGCCACC |
| 4630 | ATTACAGGCGCCTGCCACCA |
| 4631 | TTACAGGCGCCTGCCACCAC |
| 4632 | TACAGGCGCCTGCCACCACA |
| 4633 | ACAGGCGCCTGCCACCACAC |
| 4634 | CAGGCGCCTGCCACCACACC |
| 4635 | AGGCGCCTGCCACCACACCT |
| 4636 | GGCGCCTGCCACCACACCTG |
| 4637 | GCGCCTGCCACCACACCTGG |
| 4638 | CGCCTGCCACCACACCTGGC |
| 4639 | GCCTGCCACCACACCTGGCT |
| 4640 | CCTGCCACCACACCTGGCTA |
| 4641 | CTGCCACCACACCTGGCTAA |
| 4642 | TGCCACCACACCTGGCTAAT |
| 4643 | GCCACCACACCTGGCTAATT |
| 4644 | CCACCACACCTGGCTAATTT |
| 4645 | CACCACACCTGGCTAATTTT |
| 4646 | ACCACACCTGGCTAATTTTT |
| 4647 | CCACACCTGGCTAATTTTTG |
| 4648 | CACACCTGGCTAATTTTTGG |
| 4649 | ACACCTGGCTAATTTTTGGT |
| 4650 | CACCTGGCTAATTTTTGGTC |
| 4651 | ACCTGGCTAATTTTTGGTCT |
| 4652 | CCTGGCTAATTTTTGGTCTT |
| 4653 | CTGGCTAATTTTTGGTCTTT |
| 4654 | TGGCTAATTTTTGGTCTTTT |
| 4655 | GGCTAATTTTTGGTCTTTTT |
| 4656 | GCTAATTTTTGGTCTTTTTT |
| 4657 | CTAATTTTTGGTCTTTTTTT |
| 4658 | TAATTTTTGGTCTTTTTTTT |
| 4659 | AATTTTTGGTCTTTTTTTTT |
| 4660 | ATTTTTGGTCTTTTTTTTTG |
| 4661 | TTTTTGGTCTTTTTTTTTGA |
| 4662 | TTTTGGTCTTTTTTTTTGAG |
| 4663 | TTTGGTCTTTTTTTTTGAGA |
| 4664 | TTGGTCTTTTTTTTTGAGAC |
| 4665 | TGGTCTTTTTTTTTGAGACT |
| 4666 | GGTCTTTTTTTTTGAGACTG |
| 4667 | GTCTTTTTTTTTGAGACTGA |
| 4668 | TCTTTTTTTTTGAGACTGAG |
| 4669 | CTTTTTTTTTGAGACTGAGT |
| 4670 | TTTTTTTTTGAGACTGAGTC |
| 4671 | TTTTTTTTGAGACTGAGTCT |
| 4672 | TTTTTTTGAGACTGAGTCTC |
| 4673 | TTTTTTGAGACTGAGTCTCA |
| 4674 | TTTTTGAGACTGAGTCTCAC |
| 4675 | TTTTGAGACTGAGTCTCACT |
| 4676 | TTTGAGACTGAGTCTCACTC |
| 4677 | TTGAGACTGAGTCTCACTCT |
| 4678 | TGAGACTGAGTCTCACTCTA |
| 4679 | GAGACTGAGTCTCACTCTAT |
| 4680 | AGACTGAGTCTCACTCTATC |
| 4681 | GACTGAGTCTCACTCTATCT |
| 4682 | ACTGAGTCTCACTCTATCTC |
| 4683 | CTGAGTCTCACTCTATCTCC |
| 4684 | TGAGTCTCACTCTATCTCCC |
| 4685 | GAGTCTCACTCTATCTCCCA |
| 4686 | AGTCTCACTCTATCTCCCAG |
| 4687 | GTCTCACTCTATCTCCCAGG |
| 4688 | TCTCACTCTATCTCCCAGGC |
| 4689 | CTCACTCTATCTCCCAGGCT |
| 4690 | TCACTCTATCTCCCAGGCTG |
| 4691 | CACTCTATCTCCCAGGCTGG |
| 4692 | ACTCTATCTCCCAGGCTGGA |
| 4693 | CTCTATCTCCCAGGCTGGAG |
| 4694 | TCTATCTCCCAGGCTGGAGT |
| 4695 | CTATCTCCCAGGCTGGAGTG |
| 4696 | TATCTCCCAGGCTGGAGTGC |
| 4697 | ATCTCCCAGGCTGGAGTGCA |
| 4698 | TCTCCCAGGCTGGAGTGCAG |
| 4699 | CTCCCAGGCTGGAGTGCAGT |
| 4700 | TCCCAGGCTGGAGTGCAGTG |
| 4701 | CCCAGGCTGGAGTGCAGTGG |
| 4702 | CCAGGCTGGAGTGCAGTGGC |
| 4703 | CAGGCTGGAGTGCAGTGGCA |
| 4704 | AGGCTGGAGTGCAGTGGCAC |
| 4705 | GGCTGGAGTGCAGTGGCACA |
| 4706 | GCTGGAGTGCAGTGGCACAA |
| 4707 | CTGGAGTGCAGTGGCACAAT |
| 4708 | TGGAGTGCAGTGGCACAATC |
| 4709 | GGAGTGCAGTGGCACAATCT |
| 4710 | GAGTGCAGTGGCACAATCTC |
| 4711 | AGTGCAGTGGCACAATCTCG |
| 4712 | GTGCAGTGGCACAATCTCGG |
| 4713 | TGCAGTGGCACAATCTCGGC |
| 4714 | GCAGTGGCACAATCTCGGCT |
| 4715 | CAGTGGCACAATCTCGGCTC |
| 4716 | AGTGGCACAATCTCGGCTCA |
| 4717 | GTGGCACAATCTCGGCTCAC |
| 4718 | TGGCACAATCTCGGCTCACT |
| 4719 | GGCACAATCTCGGCTCACTG |
| 4720 | GCACAATCTCGGCTCACTGC |
| 4721 | CACAATCTCGGCTCACTGCA |
| 4722 | ACAATCTCGGCTCACTGCAC |
| 4723 | CAATCTCGGCTCACTGCACC |
| 4724 | AATCTCGGCTCACTGCACCT |
| 4725 | ATCTCGGCTCACTGCACCTC |
| 4726 | TCTCGGCTCACTGCACCTCT |
| 4727 | CTCGGCTCACTGCACCTCTG |
| 4728 | TCGGCTCACTGCACCTCTGC |
| 4729 | CGGCTCACTGCACCTCTGCC |
| 4730 | GGCTCACTGCACCTCTGCCT |
| 4731 | GCTCACTGCACCTCTGCCTC |
| 4732 | CTCACTGCACCTCTGCCTCC |
| 4733 | TCACTGCACCTCTGCCTCCC |
| 4734 | CACTGCACCTCTGCCTCCCA |
| 4735 | ACTGCACCTCTGCCTCCCAG |
| 4736 | CTGCACCTCTGCCTCCCAGG |
| 4737 | TGCACCTCTGCCTCCCAGGT |
| 4738 | GCACCTCTGCCTCCCAGGTT |
| 4739 | CACCTCTGCCTCCCAGGTTC |
| 4740 | ACCTCTGCCTCCCAGGTTCA |
| 4741 | CCTCTGCCTCCCAGGTTCAA |
| 4742 | CTCTGCCTCCCAGGTTCAAG |
| 4743 | TCTGCCTCCCAGGTTCAAGG |
| 4744 | CTGCCTCCCAGGTTCAAGGG |
| 4745 | TGCCTCCCAGGTTCAAGGGA |
| 4746 | GCCTCCCAGGTTCAAGGGAT |
| 4747 | CCTCCCAGGTTCAAGGGATT |
| 4748 | CTCCCAGGTTCAAGGGATTC |
| 4749 | TCCCAGGTTCAAGGGATTCT |
| 4750 | CCCAGGTTCAAGGGATTCTC |
| 4751 | CCAGGTTCAAGGGATTCTCA |
| 4752 | CAGGTTCAAGGGATTCTCAT |
| 4753 | AGGTTCAAGGGATTCTCATG |
| 4754 | GGTTCAAGGGATTCTCATGC |
| 4755 | GTTCAAGGGATTCTCATGCC |
| 4756 | TTCAAGGGATTCTCATGCCT |
| 4757 | TCAAGGGATTCTCATGCCTC |
| 4758 | CAAGGGATTCTCATGCCTCA |
| 4759 | AAGGGATTCTCATGCCTCAG |
| 4760 | AGGGATTCTCATGCCTCAGC |
| 4761 | GGGATTCTCATGCCTCAGCC |
| 4762 | GGATTCTCATGCCTCAGCCT |
| 4763 | GATTCTCATGCCTCAGCCTC |
| 4764 | ATTCTCATGCCTCAGCCTCC |
| 4765 | TTCTCATGCCTCAGCCTCCT |
| 4766 | TCTCATGCCTCAGCCTCCTG |
| 4767 | CTCATGCCTCAGCCTCCTGA |
| 4768 | TCATGCCTCAGCCTCCTGAG |
| 4769 | CATGCCTCAGCCTCCTGAGT |
| 4770 | ATGCCTCAGCCTCCTGAGTA |
| 4771 | TGCCTCAGCCTCCTGAGTAG |
| 4772 | GCCTCAGCCTCCTGAGTAGC |
| 4773 | CCTCAGCCTCCTGAGTAGCC |
| 4774 | CTCAGCCTCCTGAGTAGCCG |
| 4775 | TCAGCCTCCTGAGTAGCCGG |
| 4776 | CAGCCTCCTGAGTAGCCGGG |
| 4777 | AGCCTCCTGAGTAGCCGGGA |
| 4778 | GCCTCCTGAGTAGCCGGGAT |
| 4779 | CCTCCTGAGTAGCCGGGATT |
| 4780 | CTCCTGAGTAGCCGGGATTA |
| 4781 | TCCTGAGTAGCCGGGATTAC |
| 4782 | CCTGAGTAGCCGGGATTACA |
| 4783 | CTGAGTAGCCGGGATTACAG |
| 4784 | TGAGTAGCCGGGATTACAGG |
| 4785 | GAGTAGCCGGGATTACAGGC |
| 4786 | AGTAGCCGGGATTACAGGCA |
| 4787 | GTAGCCGGGATTACAGGCAC |
| 4788 | TAGCCGGGATTACAGGCACC |
| 4789 | AGCCGGGATTACAGGCACCC |
| 4790 | GCCGGGATTACAGGCACCCG |
| 4791 | CCGGGATTACAGGCACCCGC |
| 4792 | CGGGATTACAGGCACCCGCC |
| 4793 | GGGATTACAGGCACCCGCCA |
| 4794 | GGATTACAGGCACCCGCCAC |
| 4795 | GATTACAGGCACCCGCCACC |
| 4796 | ATTACAGGCACCCGCCACCA |
| 4797 | TTACAGGCACCCGCCACCAC |
| 4798 | TACAGGCACCCGCCACCACG |
| 4799 | ACAGGCACCCGCCACCACGC |
| 4800 | CAGGCACCCGCCACCACGCC |
| 4801 | AGGCACCCGCCACCACGCCT |
| 4802 | GGCACCCGCCACCACGCCTG |
| 4803 | GCACCCGCCACCACGCCTGG |
| 4804 | CACCCGCCACCACGCCTGGC |
| 4805 | ACCCGCCACCACGCCTGGCT |
| 4806 | CCCGCCACCACGCCTGGCTA |
| 4807 | CCGCCACCACGCCTGGCTAG |
| 4808 | CGCCACCACGCCTGGCTAGT |
| 4809 | GCCACCACGCCTGGCTAGTT |
| 4810 | CCACCACGCCTGGCTAGTTT |
| 4811 | CACCACGCCTGGCTAGTTTT |
| 4812 | ACCACGCCTGGCTAGTTTTT |
| 4813 | CCACGCCTGGCTAGTTTTTG |
| 4814 | CACGCCTGGCTAGTTTTTGT |
| 4815 | ACGCCTGGCTAGTTTTTGTA |
| 4816 | CGCCTGGCTAGTTTTTGTAT |
| 4817 | GCCTGGCTAGTTTTTGTATT |
| 4818 | CCTGGCTAGTTTTTGTATTT |
| 4819 | CTGGCTAGTTTTTGTATTTT |
| 4820 | TGGCTAGTTTTTGTATTTTT |
| 4821 | GGCTAGTTTTTGTATTTTTA |
| 4822 | GCTAGTTTTTGTATTTTTAG |
| 4823 | CTAGTTTTTGTATTTTTAGT |
| 4824 | TAGTTTTTGTATTTTTAGTA |
| 4825 | AGTTTTTGTATTTTTAGTAG |
| 4826 | GTTTTTGTATTTTTAGTAGT |
| 4827 | TTTTTGTATTTTTAGTAGTG |
| 4828 | TTTTGTATTTTTAGTAGTGA |
| 4829 | TTTGTATTTTTAGTAGTGAG |
| 4830 | TTGTATTTTTAGTAGTGAGG |
| 4831 | TGTATTTTTAGTAGTGAGGG |
| 4832 | GTATTTTTAGTAGTGAGGGG |
| 4833 | TATTTTTAGTAGTGAGGGGG |
| 4834 | ATTTTTAGTAGTGAGGGGGT |
| 4835 | TTTTTAGTAGTGAGGGGGTT |
| 4836 | TTTTAGTAGTGAGGGGGTTT |
| 4837 | TTTAGTAGTGAGGGGGTTTC |
| 4838 | TTAGTAGTGAGGGGGTTTCA |
| 4839 | TAGTAGTGAGGGGGTTTCAC |
| 4840 | AGTAGTGAGGGGGTTTCACC |
| 4841 | GTAGTGAGGGGGTTTCACCA |
| 4842 | TAGTGAGGGGGTTTCACCAT |
| 4843 | AGTGAGGGGGTTTCACCATG |
| 4844 | GTGAGGGGGTTTCACCATGT |
| 4845 | TGAGGGGGTTTCACCATGTT |
| 4846 | GAGGGGGTTTCACCATGTTG |
| 4847 | AGGGGGTTTCACCATGTTGG |
| 4848 | GGGGGTTTCACCATGTTGGC |
| 4849 | GGGGTTTCACCATGTTGGCC |
| 4850 | GGGTTTCACCATGTTGGCCA |
| 4851 | GGTTTCACCATGTTGGCCAG |
| 4852 | GTTTCACCATGTTGGCCAGG |
| 4853 | TTTCACCATGTTGGCCAGGT |
| 4854 | TTCACCATGTTGGCCAGGTT |
| 4855 | TCACCATGTTGGCCAGGTTG |
| 4856 | CACCATGTTGGCCAGGTTGG |
| 4857 | ACCATGTTGGCCAGGTTGGT |
| 4858 | CCATGTTGGCCAGGTTGGTC |
| 4859 | CATGTTGGCCAGGTTGGTCT |
| 4860 | ATGTTGGCCAGGTTGGTCTC |
| 4861 | TGTTGGCCAGGTTGGTCTCA |
| 4862 | GTTGGCCAGGTTGGTCTCAA |
| 4863 | TTGGCCAGGTTGGTCTCAAA |
| 4864 | TGGCCAGGTTGGTCTCAAAC |
| 4865 | GGCCAGGTTGGTCTCAAACT |
| 4866 | GCCAGGTTGGTCTCAAACTC |
| 4867 | CCAGGTTGGTCTCAAACTCC |
| 4868 | CAGGTTGGTCTCAAACTCCT |
| 4869 | AGGTTGGTCTCAAACTCCTT |
| 4870 | GGTTGGTCTCAAACTCCTTA |
| 4871 | GTTGGTCTCAAACTCCTTAC |
| 4872 | TTGGTCTCAAACTCCTTACC |
| 4873 | TGGTCTCAAACTCCTTACCT |
| 4874 | GGTCTCAAACTCCTTACCTC |
| 4875 | GTCTCAAACTCCTTACCTCA |
| 4876 | TCTCAAACTCCTTACCTCAT |
| 4877 | CTCAAACTCCTTACCTCATG |
| 4878 | TCAAACTCCTTACCTCATGT |
| 4879 | CAAACTCCTTACCTCATGTG |
| 4880 | AAACTCCTTACCTCATGTGA |
| 4881 | AACTCCTTACCTCATGTGAT |
| 4882 | ACTCCTTACCTCATGTGATC |
| 4883 | CTCCTTACCTCATGTGATCC |
| 4884 | TCCTTACCTCATGTGATCCA |
| 4885 | CCTTACCTCATGTGATCCAC |
| 4886 | CTTACCTCATGTGATCCACC |
| 4887 | TTACCTCATGTGATCCACCC |
| 4888 | TACCTCATGTGATCCACCCT |
| 4889 | ACCTCATGTGATCCACCCTC |
| 4890 | CCTCATGTGATCCACCCTCC |
| 4891 | CTCATGTGATCCACCCTCCT |
| 4892 | TCATGTGATCCACCCTCCTC |
| 4893 | CATGTGATCCACCCTCCTCA |
| 4894 | ATGTGATCCACCCTCCTCAG |
| 4895 | TGTGATCCACCCTCCTCAGC |
| 4896 | GTGATCCACCCTCCTCAGCC |
| 4897 | TGATCCACCCTCCTCAGCCT |
| 4898 | GATCCACCCTCCTCAGCCTC |
| 4899 | ATCCACCCTCCTCAGCCTCC |
| 4900 | TCCACCCTCCTCAGCCTCCC |
| 4901 | CCACCCTCCTCAGCCTCCCA |
| 4902 | CACCCTCCTCAGCCTCCCAA |
| 4903 | ACCCTCCTCAGCCTCCCAAA |
| 4904 | CCCTCCTCAGCCTCCCAAAG |
| 4905 | CCTCCTCAGCCTCCCAAAGT |
| 4906 | CTCCTCAGCCTCCCAAAGTG |
| 4907 | TCCTCAGCCTCCCAAAGTGC |
| 4908 | CCTCAGCCTCCCAAAGTGCT |
| 4909 | CTCAGCCTCCCAAAGTGCTG |
| 4910 | TCAGCCTCCCAAAGTGCTGG |
| 4911 | CAGCCTCCCAAAGTGCTGGG |
| 4912 | AGCCTCCCAAAGTGCTGGGA |
| 4913 | GCCTCCCAAAGTGCTGGGAT |
| 4914 | CCTCCCAAAGTGCTGGGATT |
| 4915 | CTCCCAAAGTGCTGGGATTA |
| 4916 | TCCCAAAGTGCTGGGATTAC |
| 4917 | CCCAAAGTGCTGGGATTACA |
| 4918 | CCAAAGTGCTGGGATTACAG |
| 4919 | CAAAGTGCTGGGATTACAGG |
| 4920 | AAAGTGCTGGGATTACAGGT |
| 4921 | AAGTGCTGGGATTACAGGTA |
| 4922 | AGTGCTGGGATTACAGGTAT |
| 4923 | GTGCTGGGATTACAGGTATG |
| 4924 | TGCTGGGATTACAGGTATGA |
| 4925 | GCTGGGATTACAGGTATGAC |
| 4926 | CTGGGATTACAGGTATGACC |
| 4927 | TGGGATTACAGGTATGACCC |
| 4928 | GGGATTACAGGTATGACCCA |
| 4929 | GGATTACAGGTATGACCCAC |
| 4930 | GATTACAGGTATGACCCACT |
| 4931 | ATTACAGGTATGACCCACTG |
| 4932 | TTACAGGTATGACCCACTGC |
| 4933 | TACAGGTATGACCCACTGCG |
| 4934 | ACAGGTATGACCCACTGCGC |
| 4935 | CAGGTATGACCCACTGCGCC |
| 4936 | AGGTATGACCCACTGCGCCT |
| 4937 | GGTATGACCCACTGCGCCTG |
| 4938 | GTATGACCCACTGCGCCTGG |
| 4939 | TATGACCCACTGCGCCTGGC |
| 4940 | ATGACCCACTGCGCCTGGCC |
| 4941 | TGACCCACTGCGCCTGGCCT |
| 4942 | GACCCACTGCGCCTGGCCTA |
| 4943 | ACCCACTGCGCCTGGCCTAA |
| 4944 | CCCACTGCGCCTGGCCTAAT |
| 4945 | CCACTGCGCCTGGCCTAATT |
| 4946 | CACTGCGCCTGGCCTAATTT |
| 4947 | ACTGCGCCTGGCCTAATTTT |
| 4948 | CTGCGCCTGGCCTAATTTTT |
| 4949 | TGCGCCTGGCCTAATTTTTG |
| 4950 | GCGCCTGGCCTAATTTTTGT |
| 4951 | CGCCTGGCCTAATTTTTGTA |
| 4952 | GCCTGGCCTAATTTTTGTAT |
| 4953 | CCTGGCCTAATTTTTGTATT |
| 4954 | CTGGCCTAATTTTTGTATTT |
| 4955 | TGGCCTAATTTTTGTATTTT |
| 4956 | GGCCTAATTTTTGTATTTTT |
| 4957 | GCCTAATTTTTGTATTTTTA |
| 4958 | CCTAATTTTTGTATTTTTAG |
| 4959 | CTAATTTTTGTATTTTTAGT |
| 4960 | TAATTTTTGTATTTTTAGTA |
| 4961 | AATTTTTGTATTTTTAGTAG |
| 4962 | ATTTTTGTATTTTTAGTAGA |
| 4963 | TTTTTGTATTTTTAGTAGAG |
| 4964 | TTTTGTATTTTTAGTAGAGA |
| 4965 | TTTGTATTTTTAGTAGAGAC |
| 4966 | TTGTATTTTTAGTAGAGACA |
| 4967 | TGTATTTTTAGTAGAGACAG |
| 4968 | GTATTTTTAGTAGAGACAGG |
| 4969 | TATTTTTAGTAGAGACAGGG |
| 4970 | ATTTTTAGTAGAGACAGGGT |
| 4971 | TTTTTAGTAGAGACAGGGTT |
| 4972 | TTTTAGTAGAGACAGGGTTT |
| 4973 | TTTAGTAGAGACAGGGTTTC |
| 4974 | TTAGTAGAGACAGGGTTTCA |
| 4975 | TAGTAGAGACAGGGTTTCAC |
| 4976 | AGTAGAGACAGGGTTTCACC |
| 4977 | GTAGAGACAGGGTTTCACCA |
| 4978 | TAGAGACAGGGTTTCACCAT |
| 4979 | AGAGACAGGGTTTCACCATG |
| 4980 | GAGACAGGGTTTCACCATGT |
| 4981 | AGACAGGGTTTCACCATGTT |
| 4982 | GACAGGGTTTCACCATGTTG |
| 4983 | ACAGGGTTTCACCATGTTGG |
| 4984 | CAGGGTTTCACCATGTTGGC |
| 4985 | AGGGTTTCACCATGTTGGCC |
| 4986 | GGGTTTCACCATGTTGGCCA |
| 4987 | GGTTTCACCATGTTGGCCAG |
| 4988 | GTTTCACCATGTTGGCCAGG |
| 4989 | TTTCACCATGTTGGCCAGGC |
| 4990 | TTCACCATGTTGGCCAGGCT |
| 4991 | TCACCATGTTGGCCAGGCTA |
| 4992 | CACCATGTTGGCCAGGCTAG |
| 4993 | ACCATGTTGGCCAGGCTAGT |
| 4994 | CCATGTTGGCCAGGCTAGTT |
| 4995 | CATGTTGGCCAGGCTAGTTT |
| 4996 | ATGTTGGCCAGGCTAGTTTT |
| 4997 | TGTTGGCCAGGCTAGTTTTG |
| 4998 | GTTGGCCAGGCTAGTTTTGA |
| 4999 | TTGGCCAGGCTAGTTTTGAA |
| 5000 | TGGCCAGGCTAGTTTTGAAC |
| 5001 | GGCCAGGCTAGTTTTGAACT |
| 5002 | GCCAGGCTAGTTTTGAACTC |
| 5003 | CCAGGCTAGTTTTGAACTCC |
| 5004 | CAGGCTAGTTTTGAACTCCT |
| 5005 | AGGCTAGTTTTGAACTCCTG |
| 5006 | GGCTAGTTTTGAACTCCTGA |
| 5007 | GCTAGTTTTGAACTCCTGAC |
| 5008 | CTAGTTTTGAACTCCTGACC |
| 5009 | TAGTTTTGAACTCCTGACCT |
| 5010 | AGTTTTGAACTCCTGACCTC |
| 5011 | GTTTTGAACTCCTGACCTCA |
| 5012 | TTTTGAACTCCTGACCTCAG |
| 5013 | TTTGAACTCCTGACCTCAGG |
| 5014 | TTGAACTCCTGACCTCAGGT |
| 5015 | TGAACTCCTGACCTCAGGTG |
| 5016 | GAACTCCTGACCTCAGGTGA |
| 5017 | AACTCCTGACCTCAGGTGAT |
| 5018 | ACTCCTGACCTCAGGTGATC |
| 5019 | CTCCTGACCTCAGGTGATCC |
| 5020 | TCCTGACCTCAGGTGATCCA |
| 5021 | CCTGACCTCAGGTGATCCAC |
| 5022 | CTGACCTCAGGTGATCCACC |
| 5023 | TGACCTCAGGTGATCCACCC |
| 5024 | GACCTCAGGTGATCCACCCA |
| 5025 | ACCTCAGGTGATCCACCCAC |
| 5026 | CCTCAGGTGATCCACCCACC |
| 5027 | CTCAGGTGATCCACCCACCT |
| 5028 | TCAGGTGATCCACCCACCTC |
| 5029 | CAGGTGATCCACCCACCTCG |
| 5030 | AGGTGATCCACCCACCTCGG |
| 5031 | GGTGATCCACCCACCTCGGC |
| 5032 | GTGATCCACCCACCTCGGCC |
| 5033 | TGATCCACCCACCTCGGCCT |
| 5034 | GATCCACCCACCTCGGCCTC |
| 5035 | ATCCACCCACCTCGGCCTCC |
| 5036 | TCCACCCACCTCGGCCTCCC |
| 5037 | CCACCCACCTCGGCCTCCCA |
| 5038 | CACCCACCTCGGCCTCCCAA |
| 5039 | ACCCACCTCGGCCTCCCAAA |
| 5040 | CCCACCTCGGCCTCCCAAAG |
| 5041 | CCACCTCGGCCTCCCAAAGT |
| 5042 | CACCTCGGCCTCCCAAAGTG |
| 5043 | ACCTCGGCCTCCCAAAGTGC |
| 5044 | CCTCGGCCTCCCAAAGTGCT |
| 5045 | CTCGGCCTCCCAAAGTGCTG |
| 5046 | TCGGCCTCCCAAAGTGCTGG |
| 5047 | CGGCCTCCCAAAGTGCTGGG |
| 5048 | GGCCTCCCAAAGTGCTGGGA |
| 5049 | GCCTCCCAAAGTGCTGGGAT |
| 5050 | CCTCCCAAAGTGCTGGGATT |
| 5051 | CTCCCAAAGTGCTGGGATTA |
| 5052 | TCCCAAAGTGCTGGGATTAC |
| 5053 | CCCAAAGTGCTGGGATTACA |
| 5054 | CCAAAGTGCTGGGATTACAG |
| 5055 | CAAAGTGCTGGGATTACAGG |
| 5056 | AAAGTGCTGGGATTACAGGT |
| 5057 | AAGTGCTGGGATTACAGGTG |
| 5058 | AGTGCTGGGATTACAGGTGT |
| 5059 | GTGCTGGGATTACAGGTGTG |
| 5060 | TGCTGGGATTACAGGTGTGA |
| 5061 | GCTGGGATTACAGGTGTGAG |
| 5062 | CTGGGATTACAGGTGTGAGC |
| 5063 | TGGGATTACAGGTGTGAGCC |
| 5064 | GGGATTACAGGTGTGAGCCC |
| 5065 | GGATTACAGGTGTGAGCCCC |
| 5066 | GATTACAGGTGTGAGCCCCC |
| 5067 | ATTACAGGTGTGAGCCCCCA |
| 5068 | TTACAGGTGTGAGCCCCCAC |
| 5069 | TACAGGTGTGAGCCCCCACA |
| 5070 | ACAGGTGTGAGCCCCCACAC |
| 5071 | CAGGTGTGAGCCCCCACACC |
| 5072 | AGGTGTGAGCCCCCACACCC |
| 5073 | GGTGTGAGCCCCCACACCCG |
| 5074 | GTGTGAGCCCCCACACCCGG |
| 5075 | TGTGAGCCCCCACACCCGGC |
| 5076 | GTGAGCCCCCACACCCGGCC |
| 5077 | TGAGCCCCCACACCCGGCCT |
| 5078 | GAGCCCCCACACCCGGCCTT |
| 5079 | AGCCCCCACACCCGGCCTTA |
| 5080 | GCCCCCACACCCGGCCTTAT |
| 5081 | CCCCCACACCCGGCCTTATT |
| 5082 | CCCCACACCCGGCCTTATTT |
| 5083 | CCCACACCCGGCCTTATTTT |
| 5084 | CCACACCCGGCCTTATTTTT |
| 5085 | CACACCCGGCCTTATTTTTA |
| 5086 | ACACCCGGCCTTATTTTTAA |
| 5087 | CACCCGGCCTTATTTTTAAG |
| 5088 | ACCCGGCCTTATTTTTAAGT |
| 5089 | CCCGGCCTTATTTTTAAGTT |
| 5090 | CCGGCCTTATTTTTAAGTTT |
| 5091 | CGGCCTTATTTTTAAGTTTA |
| 5092 | GGCCTTATTTTTAAGTTTAA |
| 5093 | GCCTTATTTTTAAGTTTAAA |
| 5094 | CCTTATTTTTAAGTTTAAAA |
| 5095 | CTTATTTTTAAGTTTAAAAA |
| 5096 | TTATTTTTAAGTTTAAAAAC |
| 5097 | TATTTTTAAGTTTAAAAACA |
| 5098 | ATTTTTAAGTTTAAAAACAA |
| 5099 | TTTTTAAGTTTAAAAACAAT |
| 5100 | TTTTAAGTTTAAAAACAATT |
| 5101 | TTTAAGTTTAAAAACAATTT |
| 5102 | TTAAGTTTAAAAACAATTTT |
| 5103 | TAAGTTTAAAAACAATTTTT |
| 5104 | AAGTTTAAAAACAATTTTTT |
| 5105 | AGTTTAAAAACAATTTTTTT |
| 5106 | GTTTAAAAACAATTTTTTTT |
| 5107 | TTTAAAAACAATTTTTTTTG |
| 5108 | TTAAAAACAATTTTTTTTGA |
| 5109 | TAAAAACAATTTTTTTTGAG |
| 5110 | AAAAACAATTTTTTTTGAGA |
| 5111 | AAAACAATTTTTTTTGAGAC |
| 5112 | AAACAATTTTTTTTGAGACA |
| 5113 | AACAATTTTTTTTGAGACAG |
| 5114 | ACAATTTTTTTTGAGACAGG |
| 5115 | CAATTTTTTTTGAGACAGGG |
| 5116 | AATTTTTTTTGAGACAGGGC |
| 5117 | ATTTTTTTTGAGACAGGGCC |
| 5118 | TTTTTTTTGAGACAGGGCCT |
| 5119 | TTTTTTTGAGACAGGGCCTG |
| 5120 | TTTTTTGAGACAGGGCCTGG |
| 5121 | TTTTTGAGACAGGGCCTGGC |
| 5122 | TTTTGAGACAGGGCCTGGCT |
| 5123 | TTTGAGACAGGGCCTGGCTC |
| 5124 | TTGAGACAGGGCCTGGCTCC |
| 5125 | TGAGACAGGGCCTGGCTCCA |
| 5126 | GAGACAGGGCCTGGCTCCAT |
| 5127 | AGACAGGGCCTGGCTCCATT |
| 5128 | GACAGGGCCTGGCTCCATTG |
| 5129 | ACAGGGCCTGGCTCCATTGC |
| 5130 | CAGGGCCTGGCTCCATTGCC |
| 5131 | AGGGCCTGGCTCCATTGCCC |
| 5132 | GGGCCTGGCTCCATTGCCCA |
| 5133 | GGCCTGGCTCCATTGCCCAG |
| 5134 | GCCTGGCTCCATTGCCCAGG |
| 5135 | CCTGGCTCCATTGCCCAGGC |
| 5136 | CTGGCTCCATTGCCCAGGCT |
| 5137 | TGGCTCCATTGCCCAGGCTG |
| 5138 | GGCTCCATTGCCCAGGCTGG |
| 5139 | GCTCCATTGCCCAGGCTGGA |
| 5140 | CTCCATTGCCCAGGCTGGAG |
| 5141 | TCCATTGCCCAGGCTGGAGT |
| 5142 | CCATTGCCCAGGCTGGAGTG |
| 5143 | CATTGCCCAGGCTGGAGTGC |
| 5144 | ATTGCCCAGGCTGGAGTGCA |
| 5145 | TTGCCCAGGCTGGAGTGCAG |
| 5146 | TGCCCAGGCTGGAGTGCAGT |
| 5147 | GCCCAGGCTGGAGTGCAGTG |
| 5148 | CCCAGGCTGGAGTGCAGTGG |
| 5149 | CCAGGCTGGAGTGCAGTGGT |
| 5150 | CAGGCTGGAGTGCAGTGGTG |
| 5151 | AGGCTGGAGTGCAGTGGTGT |
| 5152 | GGCTGGAGTGCAGTGGTGTG |
| 5153 | GCTGGAGTGCAGTGGTGTGG |
| 5154 | CTGGAGTGCAGTGGTGTGGT |
| 5155 | TGGAGTGCAGTGGTGTGGTG |
| 5156 | GGAGTGCAGTGGTGTGGTGA |
| 5157 | GAGTGCAGTGGTGTGGTGAT |
| 5158 | AGTGCAGTGGTGTGGTGATG |
| 5159 | GTGCAGTGGTGTGGTGATGG |
| 5160 | TGCAGTGGTGTGGTGATGGC |
| 5161 | GCAGTGGTGTGGTGATGGCT |
| 5162 | CAGTGGTGTGGTGATGGCTC |
| 5163 | AGTGGTGTGGTGATGGCTCA |
| 5164 | GTGGTGTGGTGATGGCTCAA |
| 5165 | TGGTGTGGTGATGGCTCAAT |
| 5166 | GGTGTGGTGATGGCTCAATG |
| 5167 | GTGTGGTGATGGCTCAATGC |
| 5168 | TGTGGTGATGGCTCAATGCA |
| 5169 | GTGGTGATGGCTCAATGCAG |
| 5170 | TGGTGATGGCTCAATGCAGC |
| 5171 | GGTGATGGCTCAATGCAGCG |
| 5172 | GTGATGGCTCAATGCAGCGT |
| 5173 | TGATGGCTCAATGCAGCGTC |
| 5174 | GATGGCTCAATGCAGCGTCA |
| 5175 | ATGGCTCAATGCAGCGTCAA |
| 5176 | TGGCTCAATGCAGCGTCAAC |
| 5177 | GGCTCAATGCAGCGTCAACC |
| 5178 | GCTCAATGCAGCGTCAACCT |
| 5179 | CTCAATGCAGCGTCAACCTT |
| 5180 | TCAATGCAGCGTCAACCTTA |
| 5181 | CAATGCAGCGTCAACCTTAC |
| 5182 | AATGCAGCGTCAACCTTACG |
| 5183 | ATGCAGCGTCAACCTTACGG |
| 5184 | TGCAGCGTCAACCTTACGGG |
| 5185 | GCAGCGTCAACCTTACGGGC |
| 5186 | CAGCGTCAACCTTACGGGCT |
| 5187 | AGCGTCAACCTTACGGGCTC |
| 5188 | GCGTCAACCTTACGGGCTCA |
| 5189 | CGTCAACCTTACGGGCTCAA |
| 5190 | GTCAACCTTACGGGCTCAAG |
| 5191 | TCAACCTTACGGGCTCAAGT |
| 5192 | CAACCTTACGGGCTCAAGTG |
| 5193 | AACCTTACGGGCTCAAGTGA |
| 5194 | ACCTTACGGGCTCAAGTGAT |
| 5195 | CCTTACGGGCTCAAGTGATT |
| 5196 | CTTACGGGCTCAAGTGATTC |
| 5197 | TTACGGGCTCAAGTGATTCT |
| 5198 | TACGGGCTCAAGTGATTCTT |
| 5199 | ACGGGCTCAAGTGATTCTTG |
| 5200 | CGGGCTCAAGTGATTCTTGT |
| 5201 | GGGCTCAAGTGATTCTTGTA |
| 5202 | GGCTCAAGTGATTCTTGTAC |
| 5203 | GCTCAAGTGATTCTTGTACC |
| 5204 | CTCAAGTGATTCTTGTACCT |
| 5205 | TCAAGTGATTCTTGTACCTG |
| 5206 | CAAGTGATTCTTGTACCTGG |
| 5207 | AAGTGATTCTTGTACCTGGG |
| 5208 | AGTGATTCTTGTACCTGGGC |
| 5209 | GTGATTCTTGTACCTGGGCC |
| 5210 | TGATTCTTGTACCTGGGCCT |
| 5211 | GATTCTTGTACCTGGGCCTC |
| 5212 | ATTCTTGTACCTGGGCCTCC |
| 5213 | TTCTTGTACCTGGGCCTCCC |
| 5214 | TCTTGTACCTGGGCCTCCCA |
| 5215 | CTTGTACCTGGGCCTCCCAA |
| 5216 | TTGTACCTGGGCCTCCCAAG |
| 5217 | TGTACCTGGGCCTCCCAAGT |
| 5218 | GTACCTGGGCCTCCCAAGTA |
| 5219 | TACCTGGGCCTCCCAAGTAG |
| 5220 | ACCTGGGCCTCCCAAGTAGC |
| 5221 | CCTGGGCCTCCCAAGTAGCT |
| 5222 | CTGGGCCTCCCAAGTAGCTG |
| 5223 | TGGGCCTCCCAAGTAGCTGG |
| 5224 | GGGCCTCCCAAGTAGCTGGG |
| 5225 | GGCCTCCCAAGTAGCTGGGA |
| 5226 | GCCTCCCAAGTAGCTGGGAC |
| 5227 | CCTCCCAAGTAGCTGGGACC |
| 5228 | CTCCCAAGTAGCTGGGACCA |
| 5229 | TCCCAAGTAGCTGGGACCAC |
| 5230 | CCCAAGTAGCTGGGACCACA |
| 5231 | CCAAGTAGCTGGGACCACAG |
| 5232 | CAAGTAGCTGGGACCACAGG |
| 5233 | AAGTAGCTGGGACCACAGGT |
| 5234 | AGTAGCTGGGACCACAGGTG |
| 5235 | GTAGCTGGGACCACAGGTGT |
| 5236 | TAGCTGGGACCACAGGTGTG |
| 5237 | AGCTGGGACCACAGGTGTGA |
| 5238 | GCTGGGACCACAGGTGTGAG |
| 5239 | CTGGGACCACAGGTGTGAGC |
| 5240 | TGGGACCACAGGTGTGAGCC |
| 5241 | GGGACCACAGGTGTGAGCCA |
| 5242 | GGACCACAGGTGTGAGCCAC |
| 5243 | GACCACAGGTGTGAGCCACC |
| 5244 | ACCACAGGTGTGAGCCACCA |
| 5245 | CCACAGGTGTGAGCCACCAT |
| 5246 | CACAGGTGTGAGCCACCATG |
| 5247 | ACAGGTGTGAGCCACCATGC |
| 5248 | CAGGTGTGAGCCACCATGCC |
| 5249 | AGGTGTGAGCCACCATGCCT |
| 5250 | GGTGTGAGCCACCATGCCTG |
| 5251 | GTGTGAGCCACCATGCCTGC |
| 5252 | TGTGAGCCACCATGCCTGCA |
| 5253 | GTGAGCCACCATGCCTGCAT |
| 5254 | TGAGCCACCATGCCTGCATT |
| 5255 | GAGCCACCATGCCTGCATTT |
| 5256 | AGCCACCATGCCTGCATTTT |
| 5257 | GCCACCATGCCTGCATTTTT |
| 5258 | CCACCATGCCTGCATTTTTT |
| 5259 | CACCATGCCTGCATTTTTTC |
| 5260 | ACCATGCCTGCATTTTTTCT |
| 5261 | CCATGCCTGCATTTTTTCTT |
| 5262 | CATGCCTGCATTTTTTCTTT |
| 5263 | ATGCCTGCATTTTTTCTTTT |
| 5264 | TGCCTGCATTTTTTCTTTTT |
| 5265 | GCCTGCATTTTTTCTTTTTC |
| 5266 | CCTGCATTTTTTCTTTTTCT |
| 5267 | CTGCATTTTTTCTTTTTCTT |
| 5268 | TGCATTTTTTCTTTTTCTTT |
| 5269 | GCATTTTTTCTTTTTCTTTT |
| 5270 | CATTTTTTCTTTTTCTTTTG |
| 5271 | ATTTTTTCTTTTTCTTTTGA |
| 5272 | TTTTTTCTTTTTCTTTTGAG |
| 5273 | TTTTTCTTTTTCTTTTGAGG |
| 5274 | TTTTCTTTTTCTTTTGAGGC |
| 5275 | TTTCTTTTTCTTTTGAGGCA |
| 5276 | TTCTTTTTCTTTTGAGGCAG |
| 5277 | TCTTTTTCTTTTGAGGCAGG |
| 5278 | CTTTTTCTTTTGAGGCAGGG |
| 5279 | TTTTTCTTTTGAGGCAGGGG |
| 5280 | TTTTCTTTTGAGGCAGGGGT |
| 5281 | TTTCTTTTGAGGCAGGGGTC |
| 5282 | TTCTTTTGAGGCAGGGGTCT |
| 5283 | TCTTTTGAGGCAGGGGTCTC |
| 5284 | CTTTTGAGGCAGGGGTCTCA |
| 5285 | TTTTGAGGCAGGGGTCTCAC |
| 5286 | TTTGAGGCAGGGGTCTCACT |
| 5287 | TTGAGGCAGGGGTCTCACTC |
| 5288 | TGAGGCAGGGGTCTCACTCT |
| 5289 | GAGGCAGGGGTCTCACTCTG |
| 5290 | AGGCAGGGGTCTCACTCTGT |
| 5291 | GGCAGGGGTCTCACTCTGTC |
| 5292 | GCAGGGGTCTCACTCTGTCA |
| 5293 | CAGGGGTCTCACTCTGTCAC |
| 5294 | AGGGGTCTCACTCTGTCACC |
| 5295 | GGGGTCTCACTCTGTCACCC |
| 5296 | GGGTCTCACTCTGTCACCCA |
| 5297 | GGTCTCACTCTGTCACCCAG |
| 5298 | GTCTCACTCTGTCACCCAGG |
| 5299 | TCTCACTCTGTCACCCAGGC |
| 5300 | CTCACTCTGTCACCCAGGCT |
| 5301 | TCACTCTGTCACCCAGGCTT |
| 5302 | CACTCTGTCACCCAGGCTTG |
| 5303 | ACTCTGTCACCCAGGCTTGA |
| 5304 | CTCTGTCACCCAGGCTTGAG |
| 5305 | TCTGTCACCCAGGCTTGAGT |
| 5306 | CTGTCACCCAGGCTTGAGTG |
| 5307 | TGTCACCCAGGCTTGAGTGC |
| 5308 | GTCACCCAGGCTTGAGTGCA |
| 5309 | TCACCCAGGCTTGAGTGCAG |
| 5310 | CACCCAGGCTTGAGTGCAGT |
| 5311 | ACCCAGGCTTGAGTGCAGTG |
| 5312 | CCCAGGCTTGAGTGCAGTGG |
| 5313 | CCAGGCTTGAGTGCAGTGGC |
| 5314 | CAGGCTTGAGTGCAGTGGCG |
| 5315 | AGGCTTGAGTGCAGTGGCGC |
| 5316 | GGCTTGAGTGCAGTGGCGCA |
| 5317 | GCTTGAGTGCAGTGGCGCAG |
| 5318 | CTTGAGTGCAGTGGCGCAGT |
| 5319 | TTGAGTGCAGTGGCGCAGTC |
| 5320 | TGAGTGCAGTGGCGCAGTCT |
| 5321 | GAGTGCAGTGGCGCAGTCTC |
| 5322 | AGTGCAGTGGCGCAGTCTCA |
| 5323 | GTGCAGTGGCGCAGTCTCAG |
| 5324 | TGCAGTGGCGCAGTCTCAGC |
| 5325 | GCAGTGGCGCAGTCTCAGCT |
| 5326 | CAGTGGCGCAGTCTCAGCTC |
| 5327 | AGTGGCGCAGTCTCAGCTCA |
| 5328 | GTGGCGCAGTCTCAGCTCAC |
| 5329 | TGGCGCAGTCTCAGCTCACT |
| 5330 | GGCGCAGTCTCAGCTCACTG |
| 5331 | GCGCAGTCTCAGCTCACTGC |
| 5332 | CGCAGTCTCAGCTCACTGCA |
| 5333 | GCAGTCTCAGCTCACTGCAG |
| 5334 | CAGTCTCAGCTCACTGCAGC |
| 5335 | AGTCTCAGCTCACTGCAGCC |
| 5336 | GTCTCAGCTCACTGCAGCCT |
| 5337 | TCTCAGCTCACTGCAGCCTT |
| 5338 | CTCAGCTCACTGCAGCCTTA |
| 5339 | TCAGCTCACTGCAGCCTTAT |
| 5340 | CAGCTCACTGCAGCCTTATC |
| 5341 | AGCTCACTGCAGCCTTATCT |
| 5342 | GCTCACTGCAGCCTTATCTC |
| 5343 | CTCACTGCAGCCTTATCTCC |
| 5344 | TCACTGCAGCCTTATCTCCT |
| 5345 | CACTGCAGCCTTATCTCCTA |
| 5346 | ACTGCAGCCTTATCTCCTAG |
| 5347 | CTGCAGCCTTATCTCCTAGG |
| 5348 | TGCAGCCTTATCTCCTAGGC |
| 5349 | GCAGCCTTATCTCCTAGGCT |
| 5350 | CAGCCTTATCTCCTAGGCTC |
| 5351 | AGCCTTATCTCCTAGGCTCA |
| 5352 | GCCTTATCTCCTAGGCTCAA |
| 5353 | CCTTATCTCCTAGGCTCAAG |
| 5354 | CTTATCTCCTAGGCTCAAGA |
| 5355 | TTATCTCCTAGGCTCAAGAG |
| 5356 | TATCTCCTAGGCTCAAGAGA |
| 5357 | ATCTCCTAGGCTCAAGAGAT |
| 5358 | TCTCCTAGGCTCAAGAGATC |
| 5359 | CTCCTAGGCTCAAGAGATCC |
| 5360 | TCCTAGGCTCAAGAGATCCT |
| 5361 | CCTAGGCTCAAGAGATCCTC |
| 5362 | CTAGGCTCAAGAGATCCTCC |
| 5363 | TAGGCTCAAGAGATCCTCCC |
| 5364 | AGGCTCAAGAGATCCTCCCA |
| 5365 | GGCTCAAGAGATCCTCCCAA |
| 5366 | GCTCAAGAGATCCTCCCAAC |
| 5367 | CTCAAGAGATCCTCCCAACT |
| 5368 | TCAAGAGATCCTCCCAACTC |
| 5369 | CAAGAGATCCTCCCAACTCA |
| 5370 | AAGAGATCCTCCCAACTCAG |
| 5371 | AGAGATCCTCCCAACTCAGC |
| 5372 | GAGATCCTCCCAACTCAGCC |
| 5373 | AGATCCTCCCAACTCAGCCT |
| 5374 | GATCCTCCCAACTCAGCCTC |
| 5375 | ATCCTCCCAACTCAGCCTCC |
| 5376 | TCCTCCCAACTCAGCCTCCC |
| 5377 | CCTCCCAACTCAGCCTCCCA |
| 5378 | CTCCCAACTCAGCCTCCCAA |
| 5379 | TCCCAACTCAGCCTCCCAAG |
| 5380 | CCCAACTCAGCCTCCCAAGT |
| 5381 | CCAACTCAGCCTCCCAAGTA |
| 5382 | CAACTCAGCCTCCCAAGTAG |
| 5383 | AACTCAGCCTCCCAAGTAGA |
| 5384 | ACTCAGCCTCCCAAGTAGAT |
| 5385 | CTCAGCCTCCCAAGTAGATG |
| 5386 | TCAGCCTCCCAAGTAGATGG |
| 5387 | CAGCCTCCCAAGTAGATGGG |
| 5388 | AGCCTCCCAAGTAGATGGGA |
| 5389 | GCCTCCCAAGTAGATGGGAA |
| 5390 | CCTCCCAAGTAGATGGGAAC |
| 5391 | CTCCCAAGTAGATGGGAACA |
| 5392 | TCCCAAGTAGATGGGAACAC |
| 5393 | CCCAAGTAGATGGGAACACA |
| 5394 | CCAAGTAGATGGGAACACAG |
| 5395 | CAAGTAGATGGGAACACAGG |
| 5396 | AAGTAGATGGGAACACAGGC |
| 5397 | AGTAGATGGGAACACAGGCA |
| 5398 | GTAGATGGGAACACAGGCAG |
| 5399 | TAGATGGGAACACAGGCAGG |
| 5400 | AGATGGGAACACAGGCAGGC |
| 5401 | GATGGGAACACAGGCAGGCA |
| 5402 | ATGGGAACACAGGCAGGCAC |
| 5403 | TGGGAACACAGGCAGGCACC |
| 5404 | GGGAACACAGGCAGGCACCA |
| 5405 | GGAACACAGGCAGGCACCAC |
| 5406 | GAACACAGGCAGGCACCACC |
| 5407 | AACACAGGCAGGCACCACCA |
| 5408 | ACACAGGCAGGCACCACCAT |
| 5409 | CACAGGCAGGCACCACCATG |
| 5410 | ACAGGCAGGCACCACCATGC |
| 5411 | CAGGCAGGCACCACCATGCC |
| 5412 | AGGCAGGCACCACCATGCCC |
| 5413 | GGCAGGCACCACCATGCCCA |
| 5414 | GCAGGCACCACCATGCCCAG |
| 5415 | CAGGCACCACCATGCCCAGC |
| 5416 | AGGCACCACCATGCCCAGCT |
| 5417 | GGCACCACCATGCCCAGCTA |
| 5418 | GCACCACCATGCCCAGCTAG |
| 5419 | CACCACCATGCCCAGCTAGT |
| 5420 | ACCACCATGCCCAGCTAGTT |
| 5421 | CCACCATGCCCAGCTAGTTT |
| 5422 | CACCATGCCCAGCTAGTTTT |
| 5423 | ACCATGCCCAGCTAGTTTTT |
| 5424 | CCATGCCCAGCTAGTTTTTT |
| 5425 | CATGCCCAGCTAGTTTTTTG |
| 5426 | ATGCCCAGCTAGTTTTTTGT |
| 5427 | TGCCCAGCTAGTTTTTTGTA |
| 5428 | GCCCAGCTAGTTTTTTGTAT |
| 5429 | CCCAGCTAGTTTTTTGTATT |
| 5430 | CCAGCTAGTTTTTTGTATTT |
| 5431 | CAGCTAGTTTTTTGTATTTT |
| 5432 | AGCTAGTTTTTTGTATTTTT |
| 5433 | GCTAGTTTTTTGTATTTTTA |
| 5434 | CTAGTTTTTTGTATTTTTAA |
| 5435 | TAGTTTTTTGTATTTTTAAT |
| 5436 | AGTTTTTTGTATTTTTAATT |
| 5437 | GTTTTTTGTATTTTTAATTG |
| 5438 | TTTTTTGTATTTTTAATTGA |
| 5439 | TTTTTGTATTTTTAATTGAG |
| 5440 | TTTTGTATTTTTAATTGAGA |
| 5441 | TTTGTATTTTTAATTGAGAC |
| 5442 | TTGTATTTTTAATTGAGACA |
| 5443 | TGTATTTTTAATTGAGACAG |
| 5444 | GTATTTTTAATTGAGACAGG |
| 5445 | TATTTTTAATTGAGACAGGA |
| 5446 | ATTTTTAATTGAGACAGGAT |
| 5447 | TTTTTAATTGAGACAGGATT |
| 5448 | TTTTAATTGAGACAGGATTT |
| 5449 | TTTAATTGAGACAGGATTTC |
| 5450 | TTAATTGAGACAGGATTTCG |
| 5451 | TAATTGAGACAGGATTTCGC |
| 5452 | AATTGAGACAGGATTTCGCC |
| 5453 | ATTGAGACAGGATTTCGCCC |
| 5454 | TTGAGACAGGATTTCGCCCT |
| 5455 | TGAGACAGGATTTCGCCCTG |
| 5456 | GAGACAGGATTTCGCCCTGT |
| 5457 | AGACAGGATTTCGCCCTGTT |
| 5458 | GACAGGATTTCGCCCTGTTG |
| 5459 | ACAGGATTTCGCCCTGTTGC |
| 5460 | CAGGATTTCGCCCTGTTGCT |
| 5461 | AGGATTTCGCCCTGTTGCTC |
| 5462 | GGATTTCGCCCTGTTGCTCA |
| 5463 | GATTTCGCCCTGTTGCTCAG |
| 5464 | ATTTCGCCCTGTTGCTCAGA |
| 5465 | TTTCGCCCTGTTGCTCAGAT |
| 5466 | TTCGCCCTGTTGCTCAGATT |
| 5467 | TCGCCCTGTTGCTCAGATTG |
| 5468 | CGCCCTGTTGCTCAGATTGG |
| 5469 | GCCCTGTTGCTCAGATTGGT |
| 5470 | CCCTGTTGCTCAGATTGGTC |
| 5471 | CCTGTTGCTCAGATTGGTCT |
| 5472 | CTGTTGCTCAGATTGGTCTC |
| 5473 | TGTTGCTCAGATTGGTCTCC |
| 5474 | GTTGCTCAGATTGGTCTCCT |
| 5475 | TTGCTCAGATTGGTCTCCTG |
| 5476 | TGCTCAGATTGGTCTCCTGG |
| 5477 | GCTCAGATTGGTCTCCTGGG |
| 5478 | CTCAGATTGGTCTCCTGGGC |
| 5479 | TCAGATTGGTCTCCTGGGCT |
| 5480 | CAGATTGGTCTCCTGGGCTC |
| 5481 | AGATTGGTCTCCTGGGCTCA |
| 5482 | GATTGGTCTCCTGGGCTCAA |
| 5483 | ATTGGTCTCCTGGGCTCAAG |
| 5484 | TTGGTCTCCTGGGCTCAAGT |
| 5485 | TGGTCTCCTGGGCTCAAGTG |
| 5486 | GGTCTCCTGGGCTCAAGTGA |
| 5487 | GTCTCCTGGGCTCAAGTGAT |
| 5488 | TCTCCTGGGCTCAAGTGATC |
| 5489 | CTCCTGGGCTCAAGTGATCC |
| 5490 | TCCTGGGCTCAAGTGATCCA |
| 5491 | CCTGGGCTCAAGTGATCCAC |
| 5492 | CTGGGCTCAAGTGATCCACT |
| 5493 | TGGGCTCAAGTGATCCACTC |
| 5494 | GGGCTCAAGTGATCCACTCG |
| 5495 | GGCTCAAGTGATCCACTCGC |
| 5496 | GCTCAAGTGATCCACTCGCT |
| 5497 | CTCAAGTGATCCACTCGCTT |
| 5498 | TCAAGTGATCCACTCGCTTC |
| 5499 | CAAGTGATCCACTCGCTTCA |
| 5500 | AAGTGATCCACTCGCTTCAG |
| 5501 | AGTGATCCACTCGCTTCAGC |
| 5502 | GTGATCCACTCGCTTCAGCC |
| 5503 | TGATCCACTCGCTTCAGCCT |
| 5504 | GATCCACTCGCTTCAGCCTC |
| 5505 | ATCCACTCGCTTCAGCCTCC |
| 5506 | TCCACTCGCTTCAGCCTCCC |
| 5507 | CCACTCGCTTCAGCCTCCCA |
| 5508 | CACTCGCTTCAGCCTCCCAA |
| 5509 | ACTCGCTTCAGCCTCCCAAA |
| 5510 | CTCGCTTCAGCCTCCCAAAG |
| 5511 | TCGCTTCAGCCTCCCAAAGT |
| 5512 | CGCTTCAGCCTCCCAAAGTG |
| 5513 | GCTTCAGCCTCCCAAAGTGC |
| 5514 | CTTCAGCCTCCCAAAGTGCT |
| 5515 | TTCAGCCTCCCAAAGTGCTG |
| 5516 | TCAGCCTCCCAAAGTGCTGG |
| 5517 | CAGCCTCCCAAAGTGCTGGG |
| 5518 | AGCCTCCCAAAGTGCTGGGA |
| 5519 | GCCTCCCAAAGTGCTGGGAT |
| 5520 | CCTCCCAAAGTGCTGGGATT |
| 5521 | CTCCCAAAGTGCTGGGATTG |
| 5522 | TCCCAAAGTGCTGGGATTGC |
| 5523 | CCCAAAGTGCTGGGATTGCA |
| 5524 | CCAAAGTGCTGGGATTGCAA |
| 5525 | CAAAGTGCTGGGATTGCAAG |
| 5526 | AAAGTGCTGGGATTGCAAGT |
| 5527 | AAGTGCTGGGATTGCAAGTG |
| 5528 | AGTGCTGGGATTGCAAGTGT |
| 5529 | GTGCTGGGATTGCAAGTGTG |
| 5530 | TGCTGGGATTGCAAGTGTGA |
| 5531 | GCTGGGATTGCAAGTGTGAG |
| 5532 | CTGGGATTGCAAGTGTGAGC |
| 5533 | TGGGATTGCAAGTGTGAGCC |
| 5534 | GGGATTGCAAGTGTGAGCCA |
| 5535 | GGATTGCAAGTGTGAGCCAC |
| 5536 | GATTGCAAGTGTGAGCCACC |
| 5537 | ATTGCAAGTGTGAGCCACCG |
| 5538 | TTGCAAGTGTGAGCCACCGT |
| 5539 | TGCAAGTGTGAGCCACCGTG |
| 5540 | GCAAGTGTGAGCCACCGTGC |
| 5541 | CAAGTGTGAGCCACCGTGCC |
| 5542 | AAGTGTGAGCCACCGTGCCT |
| 5543 | AGTGTGAGCCACCGTGCCTA |
| 5544 | GTGTGAGCCACCGTGCCTAA |
| 5545 | TGTGAGCCACCGTGCCTAAT |
| 5546 | GTGAGCCACCGTGCCTAATT |
| 5547 | TGAGCCACCGTGCCTAATTT |
| 5548 | GAGCCACCGTGCCTAATTTT |
| 5549 | AGCCACCGTGCCTAATTTTT |
| 5550 | GCCACCGTGCCTAATTTTTT |
| 5551 | CCACCGTGCCTAATTTTTTT |
| 5552 | CACCGTGCCTAATTTTTTTT |
| 5553 | ACCGTGCCTAATTTTTTTTT |
| 5554 | CCGTGCCTAATTTTTTTTTT |
| 5555 | CGTGCCTAATTTTTTTTTTT |
| 5556 | GTGCCTAATTTTTTTTTTTT |
| 5557 | TGCCTAATTTTTTTTTTTTT |
| 5558 | GCCTAATTTTTTTTTTTTTT |
| 5559 | CCTAATTTTTTTTTTTTTTT |
| 5560 | CTAATTTTTTTTTTTTTTTG |
| 5561 | TAATTTTTTTTTTTTTTTGA |
| 5562 | AATTTTTTTTTTTTTTTGAG |
| 5563 | ATTTTTTTTTTTTTTTGAGA |
| 5564 | TTTTTTTTTTTTTTTGAGAA |
| 5565 | TTTTTTTTTTTTTTGAGAAT |
| 5566 | TTTTTTTTTTTTTGAGAATT |
| 5567 | TTTTTTTTTTTTGAGAATTG |
| 5568 | TTTTTTTTTTTGAGAATTGC |
| 5569 | TTTTTTTTTTGAGAATTGCT |
| 5570 | TTTTTTTTTGAGAATTGCTT |
| 5571 | TTTTTTTTGAGAATTGCTTG |
| 5572 | TTTTTTTGAGAATTGCTTGA |
| 5573 | TTTTTTGAGAATTGCTTGAA |
| 5574 | TTTTTGAGAATTGCTTGAAC |
| 5575 | TTTTGAGAATTGCTTGAACC |
| 5576 | TTTGAGAATTGCTTGAACCC |
| 5577 | TTGAGAATTGCTTGAACCCG |
| 5578 | TGAGAATTGCTTGAACCCGG |
| 5579 | GAGAATTGCTTGAACCCGGG |
| 5580 | AGAATTGCTTGAACCCGGGA |
| 5581 | GAATTGCTTGAACCCGGGAG |
| 5582 | AATTGCTTGAACCCGGGAGG |
| 5583 | ATTGCTTGAACCCGGGAGGT |
| 5584 | TTGCTTGAACCCGGGAGGTG |
| 5585 | TGCTTGAACCCGGGAGGTGG |
| 5586 | GCTTGAACCCGGGAGGTGGA |
| 5587 | CTTGAACCCGGGAGGTGGAG |
| 5588 | TTGAACCCGGGAGGTGGAGG |
| 5589 | TGAACCCGGGAGGTGGAGGT |
| 5590 | GAACCCGGGAGGTGGAGGTT |
| 5591 | AACCCGGGAGGTGGAGGTTG |
| 5592 | ACCCGGGAGGTGGAGGTTGC |
| 5593 | CCCGGGAGGTGGAGGTTGCA |
| 5594 | CCGGGAGGTGGAGGTTGCAG |
| 5595 | CGGGAGGTGGAGGTTGCAGT |
| 5596 | GGGAGGTGGAGGTTGCAGTG |
| 5597 | GGAGGTGGAGGTTGCAGTGA |
| 5598 | GAGGTGGAGGTTGCAGTGAG |
| 5599 | AGGTGGAGGTTGCAGTGAGC |
| 5600 | GGTGGAGGTTGCAGTGAGCC |
| 5601 | GTGGAGGTTGCAGTGAGCCG |
| 5602 | TGGAGGTTGCAGTGAGCCGA |
| 5603 | GGAGGTTGCAGTGAGCCGAG |
| 5604 | GAGGTTGCAGTGAGCCGAGA |
| 5605 | AGGTTGCAGTGAGCCGAGAT |
| 5606 | GGTTGCAGTGAGCCGAGATC |
| 5607 | GTTGCAGTGAGCCGAGATCG |
| 5608 | TTGCAGTGAGCCGAGATCGC |
| 5609 | TGCAGTGAGCCGAGATCGCA |
| 5610 | GCAGTGAGCCGAGATCGCAC |
| 5611 | CAGTGAGCCGAGATCGCACC |
| 5612 | AGTGAGCCGAGATCGCACCA |
| 5613 | GTGAGCCGAGATCGCACCAC |
| 5614 | TGAGCCGAGATCGCACCACT |
| 5615 | GAGCCGAGATCGCACCACTG |
| 5616 | AGCCGAGATCGCACCACTGC |
| 5617 | GCCGAGATCGCACCACTGCA |
| 5618 | CCGAGATCGCACCACTGCAC |
| 5619 | CGAGATCGCACCACTGCACT |
| 5620 | GAGATCGCACCACTGCACTC |
| 5621 | AGATCGCACCACTGCACTCC |
| 5622 | GATCGCACCACTGCACTCCA |
| 5623 | ATCGCACCACTGCACTCCAG |
| 5624 | TCGCACCACTGCACTCCAGC |
| 5625 | CGCACCACTGCACTCCAGCT |
| 5626 | GCACCACTGCACTCCAGCTT |
| 5627 | CACCACTGCACTCCAGCTTA |
| 5628 | ACCACTGCACTCCAGCTTAG |
| 5629 | CCACTGCACTCCAGCTTAGG |
| 5630 | CACTGCACTCCAGCTTAGGC |
| 5631 | ACTGCACTCCAGCTTAGGCA |
| 5632 | CTGCACTCCAGCTTAGGCAA |
| 5633 | TGCACTCCAGCTTAGGCAAC |
| 5634 | GCACTCCAGCTTAGGCAACA |
| 5635 | CACTCCAGCTTAGGCAACAG |
| 5636 | ACTCCAGCTTAGGCAACAGA |
| 5637 | CTCCAGCTTAGGCAACAGAG |
| 5638 | TCCAGCTTAGGCAACAGAGT |
| 5639 | CCAGCTTAGGCAACAGAGTG |
| 5640 | CAGCTTAGGCAACAGAGTGA |
| 5641 | AGCTTAGGCAACAGAGTGAG |
| 5642 | GCTTAGGCAACAGAGTGAGA |
| 5643 | CTTAGGCAACAGAGTGAGAC |
| 5644 | TTAGGCAACAGAGTGAGACC |
| 5645 | TAGGCAACAGAGTGAGACCC |
| 5646 | AGGCAACAGAGTGAGACCCT |
| 5647 | GGCAACAGAGTGAGACCCTG |
| 5648 | GCAACAGAGTGAGACCCTGT |
| 5649 | CAACAGAGTGAGACCCTGTT |
| 5650 | AACAGAGTGAGACCCTGTTT |
| 5651 | ACAGAGTGAGACCCTGTTTC |
| 5652 | CAGAGTGAGACCCTGTTTCA |
| 5653 | AGAGTGAGACCCTGTTTCAA |
| 5654 | GAGTGAGACCCTGTTTCAAA |
| 5655 | AGTGAGACCCTGTTTCAAAA |
| 5656 | GTGAGACCCTGTTTCAAAAA |
| 5657 | TGAGACCCTGTTTCAAAAAA |
| 5658 | GAGACCCTGTTTCAAAAAAA |
| 5659 | AGACCCTGTTTCAAAAAAAA |
| 5660 | GACCCTGTTTCAAAAAAAAA |
| 5661 | ACCCTGTTTCAAAAAAAAAA |
| 5662 | CCCTGTTTCAAAAAAAAAAA |
| 5663 | CCTGTTTCAAAAAAAAAAAA |
| 5664 | CTGTTTCAAAAAAAAAAAAA |
| 5665 | TGTTTCAAAAAAAAAAAAAA |
| 5666 | GTTTCAAAAAAAAAAAAAAA |
| 5667 | TTTCAAAAAAAAAAAAAAAA |
| 5668 | TTCAAAAAAAAAAAAAAAAA |
| 5669 | TCAAAAAAAAAAAAAAAAAA |
| 5670 | CAAAAAAAAAAAAAAAAAAA |
| 5671 | AAAAAAAAAAAAAAAAAAAG |
| 5672 | AAAAAAAAAAAAAAAAAAGA |
| 5673 | AAAAAAAAAAAAAAAAAGAA |
| 5674 | AAAAAAAAAAAAAAAAGAAT |
| 5675 | AAAAAAAAAAAAAAAGAATC |
| 5676 | AAAAAAAAAAAAAAGAATCC |
| 5677 | AAAAAAAAAAAAAGAATCCT |
| 5678 | AAAAAAAAAAAAGAATCCTG |
| 5679 | AAAAAAAAAAAGAATCCTGT |
| 5680 | AAAAAAAAAAGAATCCTGTG |
| 5681 | AAAAAAAAAGAATCCTGTGG |
| 5682 | AAAAAAAAGAATCCTGTGGA |
| 5683 | AAAAAAAGAATCCTGTGGAG |
| 5684 | AAAAAAGAATCCTGTGGAGC |
| 5685 | AAAAAGAATCCTGTGGAGCA |
| 5686 | AAAAGAATCCTGTGGAGCAC |
| 5687 | AAAGAATCCTGTGGAGCACC |
| 5688 | AAGAATCCTGTGGAGCACCA |
| 5689 | AGAATCCTGTGGAGCACCAT |
| 5690 | GAATCCTGTGGAGCACCATT |
| 5691 | AATCCTGTGGAGCACCATTA |
| 5692 | ATCCTGTGGAGCACCATTAT |
| 5693 | TCCTGTGGAGCACCATTATA |
| 5694 | CCTGTGGAGCACCATTATAA |
| 5695 | CTGTGGAGCACCATTATAAA |
| 5696 | TGTGGAGCACCATTATAAAG |
| 5697 | GTGGAGCACCATTATAAAGA |
| 5698 | TGGAGCACCATTATAAAGAT |
| 5699 | GGAGCACCATTATAAAGATG |
| 5700 | GAGCACCATTATAAAGATGT |
| 5701 | AGCACCATTATAAAGATGTT |
| 5702 | GCACCATTATAAAGATGTTT |
| 5703 | CACCATTATAAAGATGTTTG |
| 5704 | ACCATTATAAAGATGTTTGT |
| 5705 | CCATTATAAAGATGTTTGTG |
| 5706 | CATTATAAAGATGTTTGTGG |
| 5707 | ATTATAAAGATGTTTGTGGC |
| 5708 | TTATAAAGATGTTTGTGGCC |
| 5709 | TATAAAGATGTTTGTGGCCG |
| 5710 | ATAAAGATGTTTGTGGCCGG |
| 5711 | TAAAGATGTTTGTGGCCGGG |
| 5712 | AAAGATGTTTGTGGCCGGGT |
| 5713 | AAGATGTTTGTGGCCGGGTA |
| 5714 | AGATGTTTGTGGCCGGGTAT |
| 5715 | GATGTTTGTGGCCGGGTATT |
| 5716 | ATGTTTGTGGCCGGGTATTG |
| 5717 | TGTTTGTGGCCGGGTATTGT |
| 5718 | GTTTGTGGCCGGGTATTGTG |
| 5719 | TTTGTGGCCGGGTATTGTGG |
| 5720 | TTGTGGCCGGGTATTGTGGC |
| 5721 | TGTGGCCGGGTATTGTGGCT |
| 5722 | GTGGCCGGGTATTGTGGCTC |
| 5723 | TGGCCGGGTATTGTGGCTCA |
| 5724 | GGCCGGGTATTGTGGCTCAC |
| 5725 | GCCGGGTATTGTGGCTCACG |
| 5726 | CCGGGTATTGTGGCTCACGC |
| 5727 | CGGGTATTGTGGCTCACGCC |
| 5728 | GGGTATTGTGGCTCACGCCT |
| 5729 | GGTATTGTGGCTCACGCCTG |
| 5730 | GTATTGTGGCTCACGCCTGT |
| 5731 | TATTGTGGCTCACGCCTGTA |
| 5732 | ATTGTGGCTCACGCCTGTAA |
| 5733 | TTGTGGCTCACGCCTGTAAT |
| 5734 | TGTGGCTCACGCCTGTAATC |
| 5735 | GTGGCTCACGCCTGTAATCC |
| 5736 | TGGCTCACGCCTGTAATCCC |
| 5737 | GGCTCACGCCTGTAATCCCA |
| 5738 | GCTCACGCCTGTAATCCCAA |
| 5739 | CTCACGCCTGTAATCCCAAC |
| 5740 | TCACGCCTGTAATCCCAACA |
| 5741 | CACGCCTGTAATCCCAACAC |
| 5742 | ACGCCTGTAATCCCAACACT |
| 5743 | CGCCTGTAATCCCAACACTT |
| 5744 | GCCTGTAATCCCAACACTTT |
| 5745 | CCTGTAATCCCAACACTTTG |
| 5746 | CTGTAATCCCAACACTTTGG |
| 5747 | TGTAATCCCAACACTTTGGG |
| 5748 | GTAATCCCAACACTTTGGGA |
| 5749 | TAATCCCAACACTTTGGGAG |
| 5750 | AATCCCAACACTTTGGGAGG |
| 5751 | ATCCCAACACTTTGGGAGGC |
| 5752 | TCCCAACACTTTGGGAGGCC |
| 5753 | CCCAACACTTTGGGAGGCCG |
| 5754 | CCAACACTTTGGGAGGCCGA |
| 5755 | CAACACTTTGGGAGGCCGAG |
| 5756 | AACACTTTGGGAGGCCGAGG |
| 5757 | ACACTTTGGGAGGCCGAGGT |
| 5758 | CACTTTGGGAGGCCGAGGTG |
| 5759 | ACTTTGGGAGGCCGAGGTGG |
| 5760 | CTTTGGGAGGCCGAGGTGGG |
| 5761 | TTTGGGAGGCCGAGGTGGGC |
| 5762 | TTGGGAGGCCGAGGTGGGCA |
| 5763 | TGGGAGGCCGAGGTGGGCAG |
| 5764 | GGGAGGCCGAGGTGGGCAGA |
| 5765 | GGAGGCCGAGGTGGGCAGAT |
| 5766 | GAGGCCGAGGTGGGCAGATC |
| 5767 | AGGCCGAGGTGGGCAGATCA |
| 5768 | GGCCGAGGTGGGCAGATCAC |
| 5769 | GCCGAGGTGGGCAGATCACT |
| 5770 | CCGAGGTGGGCAGATCACTT |
| 5771 | CGAGGTGGGCAGATCACTTG |
| 5772 | GAGGTGGGCAGATCACTTGA |
| 5773 | AGGTGGGCAGATCACTTGAG |
| 5774 | GGTGGGCAGATCACTTGAGG |
| 5775 | GTGGGCAGATCACTTGAGGT |
| 5776 | TGGGCAGATCACTTGAGGTC |
| 5777 | GGGCAGATCACTTGAGGTCA |
| 5778 | GGCAGATCACTTGAGGTCAG |
| 5779 | GCAGATCACTTGAGGTCAGG |
| 5780 | CAGATCACTTGAGGTCAGGA |
| 5781 | AGATCACTTGAGGTCAGGAG |
| 5782 | GATCACTTGAGGTCAGGAGT |
| 5783 | ATCACTTGAGGTCAGGAGTT |
| 5784 | TCACTTGAGGTCAGGAGTTC |
| 5785 | CACTTGAGGTCAGGAGTTCA |
| 5786 | ACTTGAGGTCAGGAGTTCAA |
| 5787 | CTTGAGGTCAGGAGTTCAAG |
| 5788 | TTGAGGTCAGGAGTTCAAGA |
| 5789 | TGAGGTCAGGAGTTCAAGAC |
| 5790 | GAGGTCAGGAGTTCAAGACC |
| 5791 | AGGTCAGGAGTTCAAGACCA |
| 5792 | GGTCAGGAGTTCAAGACCAC |
| 5793 | GTCAGGAGTTCAAGACCACC |
| 5794 | TCAGGAGTTCAAGACCACCC |
| 5795 | CAGGAGTTCAAGACCACCCT |
| 5796 | AGGAGTTCAAGACCACCCTG |
| 5797 | GGAGTTCAAGACCACCCTGG |
| 5798 | GAGTTCAAGACCACCCTGGC |
| 5799 | AGTTCAAGACCACCCTGGCC |
| 5800 | GTTCAAGACCACCCTGGCCA |
| 5801 | TTCAAGACCACCCTGGCCAA |
| 5802 | TCAAGACCACCCTGGCCAAC |
| 5803 | CAAGACCACCCTGGCCAACA |
| 5804 | AAGACCACCCTGGCCAACAT |
| 5805 | AGACCACCCTGGCCAACATG |
| 5806 | GACCACCCTGGCCAACATGG |
| 5807 | ACCACCCTGGCCAACATGGT |
| 5808 | CCACCCTGGCCAACATGGTG |
| 5809 | CACCCTGGCCAACATGGTGA |
| 5810 | ACCCTGGCCAACATGGTGAA |
| 5811 | CCCTGGCCAACATGGTGAAA |
| 5812 | CCTGGCCAACATGGTGAAAC |
| 5813 | CTGGCCAACATGGTGAAACC |
| 5814 | TGGCCAACATGGTGAAACCC |
| 5815 | GGCCAACATGGTGAAACCCC |
| 5816 | GCCAACATGGTGAAACCCCG |
| 5817 | CCAACATGGTGAAACCCCGT |
| 5818 | CAACATGGTGAAACCCCGTC |
| 5819 | AACATGGTGAAACCCCGTCT |
| 5820 | ACATGGTGAAACCCCGTCTC |
| 5821 | CATGGTGAAACCCCGTCTCT |
| 5822 | ATGGTGAAACCCCGTCTCTA |
| 5823 | TGGTGAAACCCCGTCTCTAC |
| 5824 | GGTGAAACCCCGTCTCTACT |
| 5825 | GTGAAACCCCGTCTCTACTA |
| 5826 | TGAAACCCCGTCTCTACTAA |
| 5827 | GAAACCCCGTCTCTACTAAA |
| 5828 | AAACCCCGTCTCTACTAAAA |
| 5829 | AACCCCGTCTCTACTAAAAA |
| 5830 | ACCCCGTCTCTACTAAAAAT |
| 5831 | CCCCGTCTCTACTAAAAATA |
| 5832 | CCCGTCTCTACTAAAAATAC |
| 5833 | CCGTCTCTACTAAAAATACA |
| 5834 | CGTCTCTACTAAAAATACAA |
| 5835 | GTCTCTACTAAAAATACAAA |
| 5836 | TCTCTACTAAAAATACAAAA |
| 5837 | CTCTACTAAAAATACAAAAC |
| 5838 | TCTACTAAAAATACAAAACA |
| 5839 | CTACTAAAAATACAAAACAA |
| 5840 | TACTAAAAATACAAAACAAT |
| 5841 | ACTAAAAATACAAAACAATT |
| 5842 | CTAAAAATACAAAACAATTA |
| 5843 | TAAAAATACAAAACAATTAT |
| 5844 | AAAAATACAAAACAATTATC |
| 5845 | AAAATACAAAACAATTATCT |
| 5846 | AAATACAAAACAATTATCTG |
| 5847 | AATACAAAACAATTATCTGT |
| 5848 | ATACAAAACAATTATCTGTG |
| 5849 | TACAAAACAATTATCTGTGC |
| 5850 | ACAAAACAATTATCTGTGCA |
| 5851 | CAAAACAATTATCTGTGCAT |
| 5852 | AAAACAATTATCTGTGCATG |
| 5853 | AAACAATTATCTGTGCATGG |
| 5854 | AACAATTATCTGTGCATGGT |
| 5855 | ACAATTATCTGTGCATGGTG |
| 5856 | CAATTATCTGTGCATGGTGG |
| 5857 | AATTATCTGTGCATGGTGGC |
| 5858 | ATTATCTGTGCATGGTGGCG |
| 5859 | TTATCTGTGCATGGTGGCGG |
| 5860 | TATCTGTGCATGGTGGCGGG |
| 5861 | ATCTGTGCATGGTGGCGGGA |
| 5862 | TCTGTGCATGGTGGCGGGAA |
| 5863 | CTGTGCATGGTGGCGGGAAC |
| 5864 | TGTGCATGGTGGCGGGAACC |
| 5865 | GTGCATGGTGGCGGGAACCT |
| 5866 | TGCATGGTGGCGGGAACCTG |
| 5867 | GCATGGTGGCGGGAACCTGT |
| 5868 | CATGGTGGCGGGAACCTGTA |
| 5869 | ATGGTGGCGGGAACCTGTAA |
| 5870 | TGGTGGCGGGAACCTGTAAT |
| 5871 | GGTGGCGGGAACCTGTAATC |
| 5872 | GTGGCGGGAACCTGTAATCC |
| 5873 | TGGCGGGAACCTGTAATCCC |
| 5874 | GGCGGGAACCTGTAATCCCA |
| 5875 | GCGGGAACCTGTAATCCCAG |
| 5876 | CGGGAACCTGTAATCCCAGC |
| 5877 | GGGAACCTGTAATCCCAGCT |
| 5878 | GGAACCTGTAATCCCAGCTA |
| 5879 | GAACCTGTAATCCCAGCTAC |
| 5880 | AACCTGTAATCCCAGCTACT |
| 5881 | ACCTGTAATCCCAGCTACTC |
| 5882 | CCTGTAATCCCAGCTACTCA |
| 5883 | CTGTAATCCCAGCTACTCAG |
| 5884 | TGTAATCCCAGCTACTCAGG |
| 5885 | GTAATCCCAGCTACTCAGGA |
| 5886 | TAATCCCAGCTACTCAGGAG |
| 5887 | AATCCCAGCTACTCAGGAGG |
| 5888 | ATCCCAGCTACTCAGGAGGC |
| 5889 | TCCCAGCTACTCAGGAGGCT |
| 5890 | CCCAGCTACTCAGGAGGCTG |
| 5891 | CCAGCTACTCAGGAGGCTGA |
| 5892 | CAGCTACTCAGGAGGCTGAG |
| 5893 | AGCTACTCAGGAGGCTGAGG |
| 5894 | GCTACTCAGGAGGCTGAGGC |
| 5895 | CTACTCAGGAGGCTGAGGCA |
| 5896 | TACTCAGGAGGCTGAGGCAG |
| 5897 | ACTCAGGAGGCTGAGGCAGG |
| 5898 | CTCAGGAGGCTGAGGCAGGA |
| 5899 | TCAGGAGGCTGAGGCAGGAG |
| 5900 | CAGGAGGCTGAGGCAGGAGA |
| 5901 | AGGAGGCTGAGGCAGGAGAA |
| 5902 | GGAGGCTGAGGCAGGAGAAT |
| 5903 | GAGGCTGAGGCAGGAGAATC |
| 5904 | AGGCTGAGGCAGGAGAATCA |
| 5905 | GGCTGAGGCAGGAGAATCAC |
| 5906 | GCTGAGGCAGGAGAATCACT |
| 5907 | CTGAGGCAGGAGAATCACTT |
| 5908 | TGAGGCAGGAGAATCACTTG |
| 5909 | GAGGCAGGAGAATCACTTGA |
| 5910 | AGGCAGGAGAATCACTTGAA |
| 5911 | GGCAGGAGAATCACTTGAAC |
| 5912 | GCAGGAGAATCACTTGAACC |
| 5913 | CAGGAGAATCACTTGAACCC |
| 5914 | AGGAGAATCACTTGAACCCA |
| 5915 | GGAGAATCACTTGAACCCAG |
| 5916 | GAGAATCACTTGAACCCAGG |
| 5917 | AGAATCACTTGAACCCAGGA |
| 5918 | GAATCACTTGAACCCAGGAG |
| 5919 | AATCACTTGAACCCAGGAGG |
| 5920 | ATCACTTGAACCCAGGAGGC |
| 5921 | TCACTTGAACCCAGGAGGCG |
| 5922 | CACTTGAACCCAGGAGGCGG |
| 5923 | ACTTGAACCCAGGAGGCGGA |
| 5924 | CTTGAACCCAGGAGGCGGAG |
| 5925 | TTGAACCCAGGAGGCGGAGG |
| 5926 | TGAACCCAGGAGGCGGAGGC |
| 5927 | GAACCCAGGAGGCGGAGGCT |
| 5928 | AACCCAGGAGGCGGAGGCTG |
| 5929 | ACCCAGGAGGCGGAGGCTGC |
| 5930 | CCCAGGAGGCGGAGGCTGCA |
| 5931 | CCAGGAGGCGGAGGCTGCAG |
| 5932 | CAGGAGGCGGAGGCTGCAGT |
| 5933 | AGGAGGCGGAGGCTGCAGTG |
| 5934 | GGAGGCGGAGGCTGCAGTGA |
| 5935 | GAGGCGGAGGCTGCAGTGAG |
| 5936 | AGGCGGAGGCTGCAGTGAGC |
| 5937 | GGCGGAGGCTGCAGTGAGCC |
| 5938 | GCGGAGGCTGCAGTGAGCCA |
| 5939 | CGGAGGCTGCAGTGAGCCAA |
| 5940 | GGAGGCTGCAGTGAGCCAAG |
| 5941 | GAGGCTGCAGTGAGCCAAGA |
| 5942 | AGGCTGCAGTGAGCCAAGAT |
| 5943 | GGCTGCAGTGAGCCAAGATC |
| 5944 | GCTGCAGTGAGCCAAGATCA |
| 5945 | CTGCAGTGAGCCAAGATCAC |
| 5946 | TGCAGTGAGCCAAGATCACG |
| 5947 | GCAGTGAGCCAAGATCACGT |
| 5948 | CAGTGAGCCAAGATCACGTC |
| 5949 | AGTGAGCCAAGATCACGTCA |
| 5950 | GTGAGCCAAGATCACGTCAC |
| 5951 | TGAGCCAAGATCACGTCACT |
| 5952 | GAGCCAAGATCACGTCACTT |
| 5953 | AGCCAAGATCACGTCACTTG |
| 5954 | GCCAAGATCACGTCACTTGC |
| 5955 | CCAAGATCACGTCACTTGCA |
| 5956 | CAAGATCACGTCACTTGCAC |
| 5957 | AAGATCACGTCACTTGCACT |
| 5958 | AGATCACGTCACTTGCACTC |
| 5959 | GATCACGTCACTTGCACTCC |
| 5960 | ATCACGTCACTTGCACTCCA |
| 5961 | TCACGTCACTTGCACTCCAG |
| 5962 | CACGTCACTTGCACTCCAGC |
| 5963 | ACGTCACTTGCACTCCAGCC |
| 5964 | CGTCACTTGCACTCCAGCCT |
| 5965 | GTCACTTGCACTCCAGCCTG |
| 5966 | TCACTTGCACTCCAGCCTGG |
| 5967 | CACTTGCACTCCAGCCTGGG |
| 5968 | ACTTGCACTCCAGCCTGGGA |
| 5969 | CTTGCACTCCAGCCTGGGAG |
| 5970 | TTGCACTCCAGCCTGGGAGA |
| 5971 | TGCACTCCAGCCTGGGAGAC |
| 5972 | GCACTCCAGCCTGGGAGACA |
| 5973 | CACTCCAGCCTGGGAGACAC |
| 5974 | ACTCCAGCCTGGGAGACACA |
| 5975 | CTCCAGCCTGGGAGACACAG |
| 5976 | TCCAGCCTGGGAGACACAGC |
| 5977 | CCAGCCTGGGAGACACAGCG |
| 5978 | CAGCCTGGGAGACACAGCGG |
| 5979 | AGCCTGGGAGACACAGCGGG |
| 5980 | GCCTGGGAGACACAGCGGGA |
| 5981 | CCTGGGAGACACAGCGGGAC |
| 5982 | CTGGGAGACACAGCGGGACT |
| 5983 | TGGGAGACACAGCGGGACTC |
| 5984 | GGGAGACACAGCGGGACTCT |
| 5985 | GGAGACACAGCGGGACTCTG |
| 5986 | GAGACACAGCGGGACTCTGT |
| 5987 | AGACACAGCGGGACTCTGTC |
| 5988 | GACACAGCGGGACTCTGTCT |
| 5989 | ACACAGCGGGACTCTGTCTC |
| 5990 | CACAGCGGGACTCTGTCTCA |
| 5991 | ACAGCGGGACTCTGTCTCAA |
| 5992 | CAGCGGGACTCTGTCTCAAA |
| 5993 | AGCGGGACTCTGTCTCAAAA |
| 5994 | GCGGGACTCTGTCTCAAAAA |
| 5995 | CGGGACTCTGTCTCAAAAAA |
| 5996 | GGGACTCTGTCTCAAAAAAT |
| 5997 | GGACTCTGTCTCAAAAAATA |
| 5998 | GACTCTGTCTCAAAAAATAA |
| 5999 | ACTCTGTCTCAAAAAATAAA |
| 6000 | CTCTGTCTCAAAAAATAAAT |
| 6001 | TCTGTCTCAAAAAATAAATA |
| 6002 | CTGTCTCAAAAAATAAATAA |
| 6003 | TGTCTCAAAAAATAAATAAG |
| 6004 | GTCTCAAAAAATAAATAAGT |
| 6005 | TCTCAAAAAATAAATAAGTA |
| 6006 | CTCAAAAAATAAATAAGTAG |
| 6007 | TCAAAAAATAAATAAGTAGG |
| 6008 | CAAAAAATAAATAAGTAGGC |
| 6009 | AAAAAATAAATAAGTAGGCC |
| 6010 | AAAAATAAATAAGTAGGCCG |
| 6011 | AAAATAAATAAGTAGGCCGG |
| 6012 | AAATAAATAAGTAGGCCGGG |
| 6013 | AATAAATAAGTAGGCCGGGC |
| 6014 | ATAAATAAGTAGGCCGGGCG |
| 6015 | TAAATAAGTAGGCCGGGCGC |
| 6016 | AAATAAGTAGGCCGGGCGCG |
| 6017 | AATAAGTAGGCCGGGCGCGG |
| 6018 | ATAAGTAGGCCGGGCGCGGT |
| 6019 | TAAGTAGGCCGGGCGCGGTG |
| 6020 | AAGTAGGCCGGGCGCGGTGG |
| 6021 | AGTAGGCCGGGCGCGGTGGC |
| 6022 | GTAGGCCGGGCGCGGTGGCT |
| 6023 | TAGGCCGGGCGCGGTGGCTC |
| 6024 | AGGCCGGGCGCGGTGGCTCA |
| 6025 | GGCCGGGCGCGGTGGCTCAC |
| 6026 | GCCGGGCGCGGTGGCTCACG |
| 6027 | CCGGGCGCGGTGGCTCACGC |
| 6028 | CGGGCGCGGTGGCTCACGCC |
| 6029 | GGGCGCGGTGGCTCACGCCT |
| 6030 | GGCGCGGTGGCTCACGCCTG |
| 6031 | GCGCGGTGGCTCACGCCTGT |
| 6032 | CGCGGTGGCTCACGCCTGTA |
| 6033 | GCGGTGGCTCACGCCTGTAA |
| 6034 | CGGTGGCTCACGCCTGTAAT |
| 6035 | GGTGGCTCACGCCTGTAATC |
| 6036 | GTGGCTCACGCCTGTAATCC |
| 6037 | TGGCTCACGCCTGTAATCCC |
| 6038 | GGCTCACGCCTGTAATCCCA |
| 6039 | GCTCACGCCTGTAATCCCAG |
| 6040 | CTCACGCCTGTAATCCCAGC |
| 6041 | TCACGCCTGTAATCCCAGCA |
| 6042 | CACGCCTGTAATCCCAGCAC |
| 6043 | ACGCCTGTAATCCCAGCACT |
| 6044 | CGCCTGTAATCCCAGCACTT |
| 6045 | GCCTGTAATCCCAGCACTTT |
| 6046 | CCTGTAATCCCAGCACTTTG |
| 6047 | CTGTAATCCCAGCACTTTGG |
| 6048 | TGTAATCCCAGCACTTTGGG |
| 6049 | GTAATCCCAGCACTTTGGGA |
| 6050 | TAATCCCAGCACTTTGGGAG |
| 6051 | AATCCCAGCACTTTGGGAGG |
| 6052 | ATCCCAGCACTTTGGGAGGC |
| 6053 | TCCCAGCACTTTGGGAGGCT |
| 6054 | CCCAGCACTTTGGGAGGCTG |
| 6055 | CCAGCACTTTGGGAGGCTGA |
| 6056 | CAGCACTTTGGGAGGCTGAG |
| 6057 | AGCACTTTGGGAGGCTGAGG |
| 6058 | GCACTTTGGGAGGCTGAGGC |
| 6059 | CACTTTGGGAGGCTGAGGCA |
| 6060 | ACTTTGGGAGGCTGAGGCAG |
| 6061 | CTTTGGGAGGCTGAGGCAGG |
| 6062 | TTTGGGAGGCTGAGGCAGGC |
| 6063 | TTGGGAGGCTGAGGCAGGCA |
| 6064 | TGGGAGGCTGAGGCAGGCAG |
| 6065 | GGGAGGCTGAGGCAGGCAGA |
| 6066 | GGAGGCTGAGGCAGGCAGAT |
| 6067 | GAGGCTGAGGCAGGCAGATC |
| 6068 | AGGCTGAGGCAGGCAGATCA |
| 6069 | GGCTGAGGCAGGCAGATCAC |
| 6070 | GCTGAGGCAGGCAGATCACG |
| 6071 | CTGAGGCAGGCAGATCACGA |
| 6072 | TGAGGCAGGCAGATCACGAG |
| 6073 | GAGGCAGGCAGATCACGAGG |
| 6074 | AGGCAGGCAGATCACGAGGT |
| 6075 | GGCAGGCAGATCACGAGGTC |
| 6076 | GCAGGCAGATCACGAGGTCA |
| 6077 | CAGGCAGATCACGAGGTCAG |
| 6078 | AGGCAGATCACGAGGTCAGG |
| 6079 | GGCAGATCACGAGGTCAGGA |
| 6080 | GCAGATCACGAGGTCAGGAG |
| 6081 | CAGATCACGAGGTCAGGAGA |
| 6082 | AGATCACGAGGTCAGGAGAT |
| 6083 | GATCACGAGGTCAGGAGATC |
| 6084 | ATCACGAGGTCAGGAGATCG |
| 6085 | TCACGAGGTCAGGAGATCGA |
| 6086 | CACGAGGTCAGGAGATCGAG |
| 6087 | ACGAGGTCAGGAGATCGAGA |
| 6088 | CGAGGTCAGGAGATCGAGAC |
| 6089 | GAGGTCAGGAGATCGAGACC |
| 6090 | AGGTCAGGAGATCGAGACCA |
| 6091 | GGTCAGGAGATCGAGACCAT |
| 6092 | GTCAGGAGATCGAGACCATC |
| 6093 | TCAGGAGATCGAGACCATCC |
| 6094 | CAGGAGATCGAGACCATCCT |
| 6095 | AGGAGATCGAGACCATCCTG |
| 6096 | GGAGATCGAGACCATCCTGG |
| 6097 | GAGATCGAGACCATCCTGGC |
| 6098 | AGATCGAGACCATCCTGGCT |
| 6099 | GATCGAGACCATCCTGGCTA |
| 6100 | ATCGAGACCATCCTGGCTAA |
| 6101 | TCGAGACCATCCTGGCTAAC |
| 6102 | CGAGACCATCCTGGCTAACA |
| 6103 | GAGACCATCCTGGCTAACAC |
| 6104 | AGACCATCCTGGCTAACACG |
| 6105 | GACCATCCTGGCTAACACGG |
| 6106 | ACCATCCTGGCTAACACGGT |
| 6107 | CCATCCTGGCTAACACGGTG |
| 6108 | CATCCTGGCTAACACGGTGA |
| 6109 | ATCCTGGCTAACACGGTGAA |
| 6110 | TCCTGGCTAACACGGTGAAA |
| 6111 | CCTGGCTAACACGGTGAAAC |
| 6112 | CTGGCTAACACGGTGAAACC |
| 6113 | TGGCTAACACGGTGAAACCC |
| 6114 | GGCTAACACGGTGAAACCCC |
| 6115 | GCTAACACGGTGAAACCCCA |
| 6116 | CTAACACGGTGAAACCCCAT |
| 6117 | TAACACGGTGAAACCCCATC |
| 6118 | AACACGGTGAAACCCCATCT |
| 6119 | ACACGGTGAAACCCCATCTC |
| 6120 | CACGGTGAAACCCCATCTCT |
| 6121 | ACGGTGAAACCCCATCTCTA |
| 6122 | CGGTGAAACCCCATCTCTAC |
| 6123 | GGTGAAACCCCATCTCTACT |
| 6124 | GTGAAACCCCATCTCTACTA |
| 6125 | TGAAACCCCATCTCTACTAA |
| 6126 | GAAACCCCATCTCTACTAAA |
| 6127 | AAACCCCATCTCTACTAAAA |
| 6128 | AACCCCATCTCTACTAAAAA |
| 6129 | ACCCCATCTCTACTAAAAAT |
| 6130 | CCCCATCTCTACTAAAAATA |
| 6131 | CCCATCTCTACTAAAAATAC |
| 6132 | CCATCTCTACTAAAAATACA |
| 6133 | CATCTCTACTAAAAATACAA |
| 6134 | ATCTCTACTAAAAATACAAA |
| 6135 | TCTCTACTAAAAATACAAAA |
| 6136 | CTCTACTAAAAATACAAAAA |
| 6137 | TCTACTAAAAATACAAAAAA |
| 6138 | CTACTAAAAATACAAAAAAA |
| 6139 | TACTAAAAATACAAAAAAAT |
| 6140 | ACTAAAAATACAAAAAAATT |
| 6141 | CTAAAAATACAAAAAAATTA |
| 6142 | TAAAAATACAAAAAAATTAG |
| 6143 | AAAAATACAAAAAAATTAGC |
| 6144 | AAAATACAAAAAAATTAGCC |
| 6145 | AAATACAAAAAAATTAGCCA |
| 6146 | AATACAAAAAAATTAGCCAG |
| 6147 | ATACAAAAAAATTAGCCAGG |
| 6148 | TACAAAAAAATTAGCCAGGC |
| 6149 | ACAAAAAAATTAGCCAGGCG |
| 6150 | CAAAAAAATTAGCCAGGCGT |
| 6151 | AAAAAAATTAGCCAGGCGTG |
| 6152 | AAAAAATTAGCCAGGCGTGG |
| 6153 | AAAAATTAGCCAGGCGTGGT |
| 6154 | AAAATTAGCCAGGCGTGGTG |
| 6155 | AAATTAGCCAGGCGTGGTGG |
| 6156 | AATTAGCCAGGCGTGGTGGT |
| 6157 | ATTAGCCAGGCGTGGTGGTG |
| 6158 | TTAGCCAGGCGTGGTGGTGG |
| 6159 | TAGCCAGGCGTGGTGGTGGG |
| 6160 | AGCCAGGCGTGGTGGTGGGC |
| 6161 | GCCAGGCGTGGTGGTGGGCA |
| 6162 | CCAGGCGTGGTGGTGGGCAC |
| 6163 | CAGGCGTGGTGGTGGGCACC |
| 6164 | AGGCGTGGTGGTGGGCACCT |
| 6165 | GGCGTGGTGGTGGGCACCTA |
| 6166 | GCGTGGTGGTGGGCACCTAT |
| 6167 | CGTGGTGGTGGGCACCTATA |
| 6168 | GTGGTGGTGGGCACCTATAG |
| 6169 | TGGTGGTGGGCACCTATAGT |
| 6170 | GGTGGTGGGCACCTATAGTC |
| 6171 | GTGGTGGGCACCTATAGTCC |
| 6172 | TGGTGGGCACCTATAGTCCC |
| 6173 | GGTGGGCACCTATAGTCCCA |
| 6174 | GTGGGCACCTATAGTCCCAG |
| 6175 | TGGGCACCTATAGTCCCAGC |
| 6176 | GGGCACCTATAGTCCCAGCT |
| 6177 | GGCACCTATAGTCCCAGCTA |
| 6178 | GCACCTATAGTCCCAGCTAC |
| 6179 | CACCTATAGTCCCAGCTACT |
| 6180 | ACCTATAGTCCCAGCTACTC |
| 6181 | CCTATAGTCCCAGCTACTCG |
| 6182 | CTATAGTCCCAGCTACTCGG |
| 6183 | TATAGTCCCAGCTACTCGGG |
| 6184 | ATAGTCCCAGCTACTCGGGA |
| 6185 | TAGTCCCAGCTACTCGGGAG |
| 6186 | AGTCCCAGCTACTCGGGAGG |
| 6187 | GTCCCAGCTACTCGGGAGGC |
| 6188 | TCCCAGCTACTCGGGAGGCT |
| 6189 | CCCAGCTACTCGGGAGGCTG |
| 6190 | CCAGCTACTCGGGAGGCTGA |
| 6191 | CAGCTACTCGGGAGGCTGAG |
| 6192 | AGCTACTCGGGAGGCTGAGG |
| 6193 | GCTACTCGGGAGGCTGAGGC |
| 6194 | CTACTCGGGAGGCTGAGGCA |
| 6195 | TACTCGGGAGGCTGAGGCAG |
| 6196 | ACTCGGGAGGCTGAGGCAGG |
| 6197 | CTCGGGAGGCTGAGGCAGGA |
| 6198 | TCGGGAGGCTGAGGCAGGAG |
| 6199 | CGGGAGGCTGAGGCAGGAGA |
| 6200 | GGGAGGCTGAGGCAGGAGAA |
| 6201 | GGAGGCTGAGGCAGGAGAAT |
| 6202 | GAGGCTGAGGCAGGAGAATG |
| 6203 | AGGCTGAGGCAGGAGAATGG |
| 6204 | GGCTGAGGCAGGAGAATGGT |
| 6205 | GCTGAGGCAGGAGAATGGTG |
| 6206 | CTGAGGCAGGAGAATGGTGT |
| 6207 | TGAGGCAGGAGAATGGTGTG |
| 6208 | GAGGCAGGAGAATGGTGTGA |
| 6209 | AGGCAGGAGAATGGTGTGAA |
| 6210 | GGCAGGAGAATGGTGTGAAC |
| 6211 | GCAGGAGAATGGTGTGAACT |
| 6212 | CAGGAGAATGGTGTGAACTC |
| 6213 | AGGAGAATGGTGTGAACTCA |
| 6214 | GGAGAATGGTGTGAACTCAG |
| 6215 | GAGAATGGTGTGAACTCAGG |
| 6216 | AGAATGGTGTGAACTCAGGA |
| 6217 | GAATGGTGTGAACTCAGGAG |
| 6218 | AATGGTGTGAACTCAGGAGG |
| 6219 | ATGGTGTGAACTCAGGAGGT |
| 6220 | TGGTGTGAACTCAGGAGGTG |
| 6221 | GGTGTGAACTCAGGAGGTGG |
| 6222 | GTGTGAACTCAGGAGGTGGA |
| 6223 | TGTGAACTCAGGAGGTGGAG |
| 6224 | GTGAACTCAGGAGGTGGAGC |
| 6225 | TGAACTCAGGAGGTGGAGCT |
| 6226 | GAACTCAGGAGGTGGAGCTT |
| 6227 | AACTCAGGAGGTGGAGCTTG |
| 6228 | ACTCAGGAGGTGGAGCTTGC |
| 6229 | CTCAGGAGGTGGAGCTTGCA |
| 6230 | TCAGGAGGTGGAGCTTGCAG |
| 6231 | CAGGAGGTGGAGCTTGCAGT |
| 6232 | AGGAGGTGGAGCTTGCAGTG |
| 6233 | GGAGGTGGAGCTTGCAGTGA |
| 6234 | GAGGTGGAGCTTGCAGTGAG |
| 6235 | AGGTGGAGCTTGCAGTGAGC |
| 6236 | GGTGGAGCTTGCAGTGAGCC |
| 6237 | GTGGAGCTTGCAGTGAGCCA |
| 6238 | TGGAGCTTGCAGTGAGCCAA |
| 6239 | GGAGCTTGCAGTGAGCCAAG |
| 6240 | GAGCTTGCAGTGAGCCAAGA |
| 6241 | AGCTTGCAGTGAGCCAAGAT |
| 6242 | GCTTGCAGTGAGCCAAGATC |
| 6243 | CTTGCAGTGAGCCAAGATCG |
| 6244 | TTGCAGTGAGCCAAGATCGT |
| 6245 | TGCAGTGAGCCAAGATCGTG |
| 6246 | GCAGTGAGCCAAGATCGTGC |
| 6247 | CAGTGAGCCAAGATCGTGCC |
| 6248 | AGTGAGCCAAGATCGTGCCA |
| 6249 | GTGAGCCAAGATCGTGCCAC |
| 6250 | TGAGCCAAGATCGTGCCACA |
| 6251 | GAGCCAAGATCGTGCCACAA |
| 6252 | AGCCAAGATCGTGCCACAAA |
| 6253 | GCCAAGATCGTGCCACAAAG |
| 6254 | CCAAGATCGTGCCACAAAGC |
| 6255 | CAAGATCGTGCCACAAAGCA |
| 6256 | AAGATCGTGCCACAAAGCAC |
| 6257 | AGATCGTGCCACAAAGCACT |
| 6258 | GATCGTGCCACAAAGCACTC |
| 6259 | ATCGTGCCACAAAGCACTCC |
| 6260 | TCGTGCCACAAAGCACTCCA |
| 6261 | CGTGCCACAAAGCACTCCAG |
| 6262 | GTGCCACAAAGCACTCCAGC |
| 6263 | TGCCACAAAGCACTCCAGCC |
| 6264 | GCCACAAAGCACTCCAGCCT |
| 6265 | CCACAAAGCACTCCAGCCTG |
| 6266 | CACAAAGCACTCCAGCCTGG |
| 6267 | ACAAAGCACTCCAGCCTGGG |
| 6268 | CAAAGCACTCCAGCCTGGGT |
| 6269 | AAAGCACTCCAGCCTGGGTG |
| 6270 | AAGCACTCCAGCCTGGGTGA |
| 6271 | AGCACTCCAGCCTGGGTGAC |
| 6272 | GCACTCCAGCCTGGGTGACA |
| 6273 | CACTCCAGCCTGGGTGACAA |
| 6274 | ACTCCAGCCTGGGTGACAAA |
| 6275 | CTCCAGCCTGGGTGACAAAG |
| 6276 | TCCAGCCTGGGTGACAAAGT |
| 6277 | CCAGCCTGGGTGACAAAGTG |
| 6278 | CAGCCTGGGTGACAAAGTGA |
| 6279 | AGCCTGGGTGACAAAGTGAG |
| 6280 | GCCTGGGTGACAAAGTGAGA |
| 6281 | CCTGGGTGACAAAGTGAGAC |
| 6282 | CTGGGTGACAAAGTGAGACT |
| 6283 | TGGGTGACAAAGTGAGACTC |
| 6284 | GGGTGACAAAGTGAGACTCC |
| 6285 | GGTGACAAAGTGAGACTCCG |
| 6286 | GTGACAAAGTGAGACTCCGT |
| 6287 | TGACAAAGTGAGACTCCGTC |
| 6288 | GACAAAGTGAGACTCCGTCT |
| 6289 | ACAAAGTGAGACTCCGTCTC |
| 6290 | CAAAGTGAGACTCCGTCTCA |
| 6291 | AAAGTGAGACTCCGTCTCAA |
| 6292 | AAGTGAGACTCCGTCTCAAA |
| 6293 | AGTGAGACTCCGTCTCAAAA |
| 6294 | GTGAGACTCCGTCTCAAAAA |
| 6295 | TGAGACTCCGTCTCAAAAAA |
| 6296 | GAGACTCCGTCTCAAAAAAT |
| 6297 | AGACTCCGTCTCAAAAAATA |
| 6298 | GACTCCGTCTCAAAAAATAA |
| 6299 | ACTCCGTCTCAAAAAATAAA |
| 6300 | CTCCGTCTCAAAAAATAAAT |
| 6301 | TCCGTCTCAAAAAATAAATA |
| 6302 | CCGTCTCAAAAAATAAATAC |
| 6303 | CGTCTCAAAAAATAAATACA |
| 6304 | GTCTCAAAAAATAAATACAT |
| 6305 | TCTCAAAAAATAAATACATA |
| 6306 | CTCAAAAAATAAATACATAA |
| 6307 | TCAAAAAATAAATACATAAA |
| 6308 | CAAAAAATAAATACATAAAT |
| 6309 | AAAAAATAAATACATAAATA |
| 6310 | AAAAATAAATACATAAATAA |
| 6311 | AAAATAAATACATAAATAAA |
| 6312 | AAATAAATACATAAATAAAT |
| 6313 | AATAAATACATAAATAAATA |
| 6314 | ATAAATACATAAATAAATAA |
| 6315 | TAAATACATAAATAAATAAA |
| 6316 | AAATACATAAATAAATAAAT |
| 6317 | AATACATAAATAAATAAATA |
| 6318 | ATACATAAATAAATAAATAA |
| 6319 | TACATAAATAAATAAATAAA |
| 6320 | ACATAAATAAATAAATAAAC |
| 6321 | CATAAATAAATAAATAAACA |
| 6322 | ATAAATAAATAAATAAACAA |
| 6323 | TAAATAAATAAATAAACAAA |
| 6324 | AAATAAATAAATAAACAAAC |
| 6325 | AATAAATAAATAAACAAACA |
| 6326 | ATAAATAAATAAACAAACAC |
| 6327 | TAAATAAATAAACAAACACA |
| 6328 | AAATAAATAAACAAACACAT |
| 6329 | AATAAATAAACAAACACATA |
| 6330 | ATAAATAAACAAACACATAA |
| 6331 | TAAATAAACAAACACATAAG |
| 6332 | AAATAAACAAACACATAAGT |
| 6333 | AATAAACAAACACATAAGTA |
| 6334 | ATAAACAAACACATAAGTAA |
| 6335 | TAAACAAACACATAAGTAAA |
| 6336 | AAACAAACACATAAGTAAAT |
| 6337 | AACAAACACATAAGTAAATA |
| 6338 | ACAAACACATAAGTAAATAA |
| 6339 | CAAACACATAAGTAAATAAA |
| 6340 | AAACACATAAGTAAATAAAA |
| 6341 | AACACATAAGTAAATAAAAG |
| 6342 | ACACATAAGTAAATAAAAGT |
| 6343 | CACATAAGTAAATAAAAGTA |
| 6344 | ACATAAGTAAATAAAAGTAA |
| 6345 | CATAAGTAAATAAAAGTAAA |
| 6346 | ATAAGTAAATAAAAGTAAAG |
| 6347 | TAAGTAAATAAAAGTAAAGA |
| 6348 | AAGTAAATAAAAGTAAAGAC |
| 6349 | AGTAAATAAAAGTAAAGACG |
| 6350 | GTAAATAAAAGTAAAGACGG |
| 6351 | TAAATAAAAGTAAAGACGGT |
| 6352 | AAATAAAAGTAAAGACGGTC |
| 6353 | AATAAAAGTAAAGACGGTCA |
| 6354 | ATAAAAGTAAAGACGGTCAA |
| 6355 | TAAAAGTAAAGACGGTCAAG |
| 6356 | AAAAGTAAAGACGGTCAAGA |
| 6357 | AAAGTAAAGACGGTCAAGAC |
| 6358 | AAGTAAAGACGGTCAAGACC |
| 6359 | AGTAAAGACGGTCAAGACCC |
| 6360 | GTAAAGACGGTCAAGACCCT |
| 6361 | TAAAGACGGTCAAGACCCTT |
| 6362 | AAAGACGGTCAAGACCCTTT |
| 6363 | AAGACGGTCAAGACCCTTTT |
| 6364 | AGACGGTCAAGACCCTTTTC |
| 6365 | GACGGTCAAGACCCTTTTCA |
| 6366 | ACGGTCAAGACCCTTTTCAG |
| 6367 | CGGTCAAGACCCTTTTCAGG |
| 6368 | GGTCAAGACCCTTTTCAGGA |
| 6369 | GTCAAGACCCTTTTCAGGAT |
| 6370 | TCAAGACCCTTTTCAGGATG |
| 6371 | CAAGACCCTTTTCAGGATGG |
| 6372 | AAGACCCTTTTCAGGATGGG |
| 6373 | AGACCCTTTTCAGGATGGGA |
| 6374 | GACCCTTTTCAGGATGGGAA |
| 6375 | ACCCTTTTCAGGATGGGAAA |
| 6376 | CCCTTTTCAGGATGGGAAAA |
| 6377 | CCTTTTCAGGATGGGAAAAC |
| 6378 | CTTTTCAGGATGGGAAAACT |
| 6379 | TTTTCAGGATGGGAAAACTG |
| 6380 | TTTCAGGATGGGAAAACTGA |
| 6381 | TTCAGGATGGGAAAACTGAG |
| 6382 | TCAGGATGGGAAAACTGAGG |
| 6383 | CAGGATGGGAAAACTGAGGC |
| 6384 | AGGATGGGAAAACTGAGGCC |
| 6385 | GGATGGGAAAACTGAGGCCA |
| 6386 | GATGGGAAAACTGAGGCCAG |
| 6387 | ATGGGAAAACTGAGGCCAGA |
| 6388 | TGGGAAAACTGAGGCCAGAT |
| 6389 | GGGAAAACTGAGGCCAGATA |
| 6390 | GGAAAACTGAGGCCAGATAG |
| 6391 | GAAAACTGAGGCCAGATAGG |
| 6392 | AAAACTGAGGCCAGATAGGC |
| 6393 | AAACTGAGGCCAGATAGGCT |
| 6394 | AACTGAGGCCAGATAGGCTA |
| 6395 | ACTGAGGCCAGATAGGCTAA |
| 6396 | CTGAGGCCAGATAGGCTAAG |
| 6397 | TGAGGCCAGATAGGCTAAGT |
| 6398 | GAGGCCAGATAGGCTAAGTT |
| 6399 | AGGCCAGATAGGCTAAGTTA |
| 6400 | GGCCAGATAGGCTAAGTTAG |
| 6401 | GCCAGATAGGCTAAGTTAGT |
| 6402 | CCAGATAGGCTAAGTTAGTG |
| 6403 | CAGATAGGCTAAGTTAGTGG |
| 6404 | AGATAGGCTAAGTTAGTGGC |
| 6405 | GATAGGCTAAGTTAGTGGCC |
| 6406 | ATAGGCTAAGTTAGTGGCCC |
| 6407 | TAGGCTAAGTTAGTGGCCCA |
| 6408 | AGGCTAAGTTAGTGGCCCAA |
| 6409 | GGCTAAGTTAGTGGCCCAAT |
| 6410 | GCTAAGTTAGTGGCCCAATC |
| 6411 | CTAAGTTAGTGGCCCAATCA |
| 6412 | TAAGTTAGTGGCCCAATCAC |
| 6413 | AAGTTAGTGGCCCAATCACA |
| 6414 | AGTTAGTGGCCCAATCACAC |
| 6415 | GTTAGTGGCCCAATCACACA |
| 6416 | TTAGTGGCCCAATCACACAC |
| 6417 | TAGTGGCCCAATCACACACA |
| 6418 | AGTGGCCCAATCACACACAC |
| 6419 | GTGGCCCAATCACACACACG |
| 6420 | TGGCCCAATCACACACACGG |
| 6421 | GGCCCAATCACACACACGGC |
| 6422 | GCCCAATCACACACACGGCA |
| 6423 | CCCAATCACACACACGGCAT |
| 6424 | CCAATCACACACACGGCATG |
| 6425 | CAATCACACACACGGCATGT |
| 6426 | AATCACACACACGGCATGTA |
| 6427 | ATCACACACACGGCATGTAA |
| 6428 | TCACACACACGGCATGTAAG |
| 6429 | CACACACACGGCATGTAAGG |
| 6430 | ACACACACGGCATGTAAGGA |
| 6431 | CACACACGGCATGTAAGGAA |
| 6432 | ACACACGGCATGTAAGGAAG |
| 6433 | CACACGGCATGTAAGGAAGA |
| 6434 | ACACGGCATGTAAGGAAGAG |
| 6435 | CACGGCATGTAAGGAAGAGG |
| 6436 | ACGGCATGTAAGGAAGAGGT |
| 6437 | CGGCATGTAAGGAAGAGGTG |
| 6438 | GGCATGTAAGGAAGAGGTGG |
| 6439 | GCATGTAAGGAAGAGGTGGG |
| 6440 | CATGTAAGGAAGAGGTGGGG |
| 6441 | ATGTAAGGAAGAGGTGGGGG |
| 6442 | TGTAAGGAAGAGGTGGGGGC |
| 6443 | GTAAGGAAGAGGTGGGGGCA |
| 6444 | TAAGGAAGAGGTGGGGGCAG |
| 6445 | AAGGAAGAGGTGGGGGCAGG |
| 6446 | AGGAAGAGGTGGGGGCAGGA |
| 6447 | GGAAGAGGTGGGGGCAGGAA |
| 6448 | GAAGAGGTGGGGGCAGGAAA |
| 6449 | AAGAGGTGGGGGCAGGAAAC |
| 6450 | AGAGGTGGGGGCAGGAAACA |
| 6451 | GAGGTGGGGGCAGGAAACAG |
| 6452 | AGGTGGGGGCAGGAAACAGA |
| 6453 | GGTGGGGGCAGGAAACAGAT |
| 6454 | GTGGGGGCAGGAAACAGATG |
| 6455 | TGGGGGCAGGAAACAGATGC |
| 6456 | GGGGGCAGGAAACAGATGCA |
| 6457 | GGGGCAGGAAACAGATGCAA |
| 6458 | GGGCAGGAAACAGATGCAAT |
| 6459 | GGCAGGAAACAGATGCAATG |
| 6460 | GCAGGAAACAGATGCAATGT |
| 6461 | CAGGAAACAGATGCAATGTG |
| 6462 | AGGAAACAGATGCAATGTGG |
| 6463 | GGAAACAGATGCAATGTGGG |
| 6464 | GAAACAGATGCAATGTGGGG |
| 6465 | AAACAGATGCAATGTGGGGT |
| 6466 | AACAGATGCAATGTGGGGTT |
| 6467 | ACAGATGCAATGTGGGGTTG |
| 6468 | CAGATGCAATGTGGGGTTGA |
| 6469 | AGATGCAATGTGGGGTTGAA |
| 6470 | GATGCAATGTGGGGTTGAAG |
| 6471 | ATGCAATGTGGGGTTGAAGG |
| 6472 | TGCAATGTGGGGTTGAAGGC |
| 6473 | GCAATGTGGGGTTGAAGGCA |
| 6474 | CAATGTGGGGTTGAAGGCAG |
| 6475 | AATGTGGGGTTGAAGGCAGG |
| 6476 | ATGTGGGGTTGAAGGCAGGA |
| 6477 | TGTGGGGTTGAAGGCAGGAC |
| 6478 | GTGGGGTTGAAGGCAGGACA |
| 6479 | TGGGGTTGAAGGCAGGACAG |
| 6480 | GGGGTTGAAGGCAGGACAGA |
| 6481 | GGGTTGAAGGCAGGACAGAG |
| 6482 | GGTTGAAGGCAGGACAGAGC |
| 6483 | GTTGAAGGCAGGACAGAGCA |
| 6484 | TTGAAGGCAGGACAGAGCAG |
| 6485 | TGAAGGCAGGACAGAGCAGC |
| 6486 | GAAGGCAGGACAGAGCAGCA |
| 6487 | AAGGCAGGACAGAGCAGCAG |
| 6488 | AGGCAGGACAGAGCAGCAGA |
| 6489 | GGCAGGACAGAGCAGCAGAA |
| 6490 | GCAGGACAGAGCAGCAGAAA |
| 6491 | CAGGACAGAGCAGCAGAAAG |
| 6492 | AGGACAGAGCAGCAGAAAGA |
| 6493 | GGACAGAGCAGCAGAAAGAT |
| 6494 | GACAGAGCAGCAGAAAGATA |
| 6495 | ACAGAGCAGCAGAAAGATAA |
| 6496 | CAGAGCAGCAGAAAGATAAG |
| 6497 | AGAGCAGCAGAAAGATAAGG |
| 6498 | GAGCAGCAGAAAGATAAGGA |
| 6499 | AGCAGCAGAAAGATAAGGAG |
| 6500 | GCAGCAGAAAGATAAGGAGG |
| 6501 | CAGCAGAAAGATAAGGAGGG |
| 6502 | AGCAGAAAGATAAGGAGGGA |
| 6503 | GCAGAAAGATAAGGAGGGAA |
| 6504 | CAGAAAGATAAGGAGGGAAG |
| 6505 | AGAAAGATAAGGAGGGAAGC |
| 6506 | GAAAGATAAGGAGGGAAGCT |
| 6507 | AAAGATAAGGAGGGAAGCTG |
| 6508 | AAGATAAGGAGGGAAGCTGC |
| 6509 | AGATAAGGAGGGAAGCTGCT |
| 6510 | GATAAGGAGGGAAGCTGCTG |
| 6511 | ATAAGGAGGGAAGCTGCTGG |
| 6512 | TAAGGAGGGAAGCTGCTGGC |
| 6513 | AAGGAGGGAAGCTGCTGGCT |
| 6514 | AGGAGGGAAGCTGCTGGCTG |
| 6515 | GGAGGGAAGCTGCTGGCTGG |
| 6516 | GAGGGAAGCTGCTGGCTGGG |
| 6517 | AGGGAAGCTGCTGGCTGGGT |
| 6518 | GGGAAGCTGCTGGCTGGGTG |
| 6519 | GGAAGCTGCTGGCTGGGTGT |
| 6520 | GAAGCTGCTGGCTGGGTGTG |
| 6521 | AAGCTGCTGGCTGGGTGTGG |
| 6522 | AGCTGCTGGCTGGGTGTGGC |
| 6523 | GCTGCTGGCTGGGTGTGGCA |
| 6524 | CTGCTGGCTGGGTGTGGCAT |
| 6525 | TGCTGGCTGGGTGTGGCATG |
| 6526 | GCTGGCTGGGTGTGGCATGG |
| 6527 | CTGGCTGGGTGTGGCATGGC |
| 6528 | TGGCTGGGTGTGGCATGGCA |
| 6529 | GGCTGGGTGTGGCATGGCAG |
| 6530 | GCTGGGTGTGGCATGGCAGG |
| 6531 | CTGGGTGTGGCATGGCAGGG |
| 6532 | TGGGTGTGGCATGGCAGGGC |
| 6533 | GGGTGTGGCATGGCAGGGCC |
| 6534 | GGTGTGGCATGGCAGGGCCT |
| 6535 | GTGTGGCATGGCAGGGCCTG |
| 6536 | TGTGGCATGGCAGGGCCTGC |
| 6537 | GTGGCATGGCAGGGCCTGCT |
| 6538 | TGGCATGGCAGGGCCTGCTC |
| 6539 | GGCATGGCAGGGCCTGCTCA |
| 6540 | GCATGGCAGGGCCTGCTCAC |
| 6541 | CATGGCAGGGCCTGCTCACC |
| 6542 | ATGGCAGGGCCTGCTCACCA |
| 6543 | TGGCAGGGCCTGCTCACCAG |
| 6544 | GGCAGGGCCTGCTCACCAGA |
| 6545 | GCAGGGCCTGCTCACCAGAG |
| 6546 | CAGGGCCTGCTCACCAGAGA |
| 6547 | AGGGCCTGCTCACCAGAGAG |
| 6548 | GGGCCTGCTCACCAGAGAGG |
| 6549 | GGCCTGCTCACCAGAGAGGC |
| 6550 | GCCTGCTCACCAGAGAGGCT |
| 6551 | CCTGCTCACCAGAGAGGCTC |
| 6552 | CTGCTCACCAGAGAGGCTCT |
| 6553 | TGCTCACCAGAGAGGCTCTT |
| 6554 | GCTCACCAGAGAGGCTCTTG |
| 6555 | CTCACCAGAGAGGCTCTTGG |
| 6556 | TCACCAGAGAGGCTCTTGGC |
| 6557 | CACCAGAGAGGCTCTTGGCG |
| 6558 | ACCAGAGAGGCTCTTGGCGC |
| 6559 | CCAGAGAGGCTCTTGGCGCA |
| 6560 | CAGAGAGGCTCTTGGCGCAG |
| 6561 | AGAGAGGCTCTTGGCGCAGT |
| 6562 | GAGAGGCTCTTGGCGCAGTT |
| 6563 | AGAGGCTCTTGGCGCAGTTC |
| 6564 | GAGGCTCTTGGCGCAGTTCT |
| 6565 | AGGCTCTTGGCGCAGTTCTT |
| 6566 | GGCTCTTGGCGCAGTTCTTG |
| 6567 | GCTCTTGGCGCAGTTCTTGT |
| 6568 | CTCTTGGCGCAGTTCTTGTC |
| 6569 | TCTTGGCGCAGTTCTTGTCC |
| 6570 | CTTGGCGCAGTTCTTGTCCC |
| 6571 | TTGGCGCAGTTCTTGTCCCT |
| 6572 | TGGCGCAGTTCTTGTCCCTG |
| 6573 | GGCGCAGTTCTTGTCCCTGC |
| 6574 | GCGCAGTTCTTGTCCCTGCG |
| 6575 | CGCAGTTCTTGTCCCTGCGG |
| 6576 | GCAGTTCTTGTCCCTGCGGA |
| 6577 | CAGTTCTTGTCCCTGCGGAG |
| 6578 | AGTTCTTGTCCCTGCGGAGG |
| 6579 | GTTCTTGTCCCTGCGGAGGT |
| 6580 | TTCTTGTCCCTGCGGAGGTC |
| 6581 | TCTTGTCCCTGCGGAGGTCG |
| 6582 | CTTGTCCCTGCGGAGGTCGT |
| 6583 | TTGTCCCTGCGGAGGTCGTG |
| 6584 | TGTCCCTGCGGAGGTCGTGA |
| 6585 | GTCCCTGCGGAGGTCGTGAT |
| 6586 | TCCCTGCGGAGGTCGTGATC |
| 6587 | CCCTGCGGAGGTCGTGATCC |
| 6588 | CCTGCGGAGGTCGTGATCCT |
| 6589 | CTGCGGAGGTCGTGATCCTG |
| 6590 | TGCGGAGGTCGTGATCCTGG |
| 6591 | GCGGAGGTCGTGATCCTGGT |
| 6592 | CGGAGGTCGTGATCCTGGTC |
| 6593 | GGAGGTCGTGATCCTGGTCC |
| 6594 | GAGGTCGTGATCCTGGTCCC |
| 6595 | AGGTCGTGATCCTGGTCCCA |
| 6596 | GGTCGTGATCCTGGTCCCAA |
| 6597 | GTCGTGATCCTGGTCCCAAG |
| 6598 | TCGTGATCCTGGTCCCAAGT |
| 6599 | CGTGATCCTGGTCCCAAGTG |
| 6600 | GTGATCCTGGTCCCAAGTGG |
| 6601 | TGATCCTGGTCCCAAGTGGA |
| 6602 | GATCCTGGTCCCAAGTGGAG |
| 6603 | ATCCTGGTCCCAAGTGGAGA |
| 6604 | TCCTGGTCCCAAGTGGAGAA |
| 6605 | CCTGGTCCCAAGTGGAGAAG |
| 6606 | CTGGTCCCAAGTGGAGAAGG |
| 6607 | TGGTCCCAAGTGGAGAAGGG |
| 6608 | GGTCCCAAGTGGAGAAGGGT |
| 6609 | GTCCCAAGTGGAGAAGGGTA |
| 6610 | TCCCAAGTGGAGAAGGGTAC |
| 6611 | CCCAAGTGGAGAAGGGTACG |
| 6612 | CCAAGTGGAGAAGGGTACGG |
| 6613 | CAAGTGGAGAAGGGTACGGA |
| 6614 | AAGTGGAGAAGGGTACGGAG |
| 6615 | AGTGGAGAAGGGTACGGAGA |
| 6616 | GTGGAGAAGGGTACGGAGAG |
| 6617 | TGGAGAAGGGTACGGAGAGG |
| 6618 | GGAGAAGGGTACGGAGAGGC |
| 6619 | GAGAAGGGTACGGAGAGGCC |
| 6620 | AGAAGGGTACGGAGAGGCCG |
| 6621 | GAAGGGTACGGAGAGGCCGC |
| 6622 | AAGGGTACGGAGAGGCCGCT |
| 6623 | AGGGTACGGAGAGGCCGCTG |
| 6624 | GGGTACGGAGAGGCCGCTGG |
| 6625 | GGTACGGAGAGGCCGCTGGG |
| 6626 | GTACGGAGAGGCCGCTGGGT |
| 6627 | TACGGAGAGGCCGCTGGGTG |
| 6628 | ACGGAGAGGCCGCTGGGTGG |
| 6629 | CGGAGAGGCCGCTGGGTGGG |
| 6630 | GGAGAGGCCGCTGGGTGGGA |
| 6631 | GAGAGGCCGCTGGGTGGGAC |
| 6632 | AGAGGCCGCTGGGTGGGACG |
| 6633 | GAGGCCGCTGGGTGGGACGG |
| 6634 | AGGCCGCTGGGTGGGACGGT |
| 6635 | GGCCGCTGGGTGGGACGGTG |
| 6636 | GCCGCTGGGTGGGACGGTGG |
| 6637 | CCGCTGGGTGGGACGGTGGT |
| 6638 | CGCTGGGTGGGACGGTGGTG |
| 6639 | GCTGGGTGGGACGGTGGTGG |
| 6640 | CTGGGTGGGACGGTGGTGGC |
| 6641 | TGGGTGGGACGGTGGTGGCG |
| 6642 | GGGTGGGACGGTGGTGGCGC |
| 6643 | GGTGGGACGGTGGTGGCGCC |
| 6644 | GTGGGACGGTGGTGGCGCCC |
| 6645 | TGGGACGGTGGTGGCGCCCA |
| 6646 | GGGACGGTGGTGGCGCCCAG |
| 6647 | GGACGGTGGTGGCGCCCAGC |
| 6648 | GACGGTGGTGGCGCCCAGCT |
| 6649 | ACGGTGGTGGCGCCCAGCTG |
| 6650 | CGGTGGTGGCGCCCAGCTGG |
| 6651 | GGTGGTGGCGCCCAGCTGGC |
| 6652 | GTGGTGGCGCCCAGCTGGCC |
| 6653 | TGGTGGCGCCCAGCTGGCCG |
| 6654 | GGTGGCGCCCAGCTGGCCGG |
| 6655 | GTGGCGCCCAGCTGGCCGGC |
| 6656 | TGGCGCCCAGCTGGCCGGCC |
| 6657 | GGCGCCCAGCTGGCCGGCCA |
| 6658 | GCGCCCAGCTGGCCGGCCAC |
| 6659 | CGCCCAGCTGGCCGGCCACG |
| 6660 | GCCCAGCTGGCCGGCCACGG |
| 6661 | CCCAGCTGGCCGGCCACGGG |
| 6662 | CCAGCTGGCCGGCCACGGGT |
| 6663 | CAGCTGGCCGGCCACGGGTG |
| 6664 | AGCTGGCCGGCCACGGGTGC |
| 6665 | GCTGGCCGGCCACGGGTGCA |
| 6666 | CTGGCCGGCCACGGGTGCAG |
| 6667 | TGGCCGGCCACGGGTGCAGT |
| 6668 | GGCCGGCCACGGGTGCAGTG |
| 6669 | GCCGGCCACGGGTGCAGTGA |
| 6670 | CCGGCCACGGGTGCAGTGAG |
| 6671 | CGGCCACGGGTGCAGTGAGC |
| 6672 | GGCCACGGGTGCAGTGAGCT |
| 6673 | GCCACGGGTGCAGTGAGCTG |
| 6674 | CCACGGGTGCAGTGAGCTGC |
| 6675 | CACGGGTGCAGTGAGCTGCA |
| 6676 | ACGGGTGCAGTGAGCTGCAG |
| 6677 | CGGGTGCAGTGAGCTGCAGG |
| 6678 | GGGTGCAGTGAGCTGCAGGC |
| 6679 | GGTGCAGTGAGCTGCAGGCT |
| 6680 | GTGCAGTGAGCTGCAGGCTA |
| 6681 | TGCAGTGAGCTGCAGGCTAT |
| 6682 | GCAGTGAGCTGCAGGCTATA |
| 6683 | CAGTGAGCTGCAGGCTATAG |
| 6684 | AGTGAGCTGCAGGCTATAGG |
| 6685 | GTGAGCTGCAGGCTATAGGC |
| 6686 | TGAGCTGCAGGCTATAGGCC |
| 6687 | GAGCTGCAGGCTATAGGCCG |
| 6688 | AGCTGCAGGCTATAGGCCGT |
| 6689 | GCTGCAGGCTATAGGCCGTG |
| 6690 | CTGCAGGCTATAGGCCGTGT |
| 6691 | TGCAGGCTATAGGCCGTGTC |
| 6692 | GCAGGCTATAGGCCGTGTCC |
| 6693 | CAGGCTATAGGCCGTGTCCT |
| 6694 | AGGCTATAGGCCGTGTCCTC |
| 6695 | GGCTATAGGCCGTGTCCTCG |
| 6696 | GCTATAGGCCGTGTCCTCGC |
| 6697 | CTATAGGCCGTGTCCTCGCC |
| 6698 | TATAGGCCGTGTCCTCGCCA |
| 6699 | ATAGGCCGTGTCCTCGCCAC |
| 6700 | TAGGCCGTGTCCTCGCCACC |
| 6701 | AGGCCGTGTCCTCGCCACCC |
| 6702 | GGCCGTGTCCTCGCCACCCA |
| 6703 | GCCGTGTCCTCGCCACCCAG |
| 6704 | CCGTGTCCTCGCCACCCAGG |
| 6705 | CGTGTCCTCGCCACCCAGGT |
| 6706 | GTGTCCTCGCCACCCAGGTG |
| 6707 | TGTCCTCGCCACCCAGGTGC |
| 6708 | GTCCTCGCCACCCAGGTGCA |
| 6709 | TCCTCGCCACCCAGGTGCAC |
| 6710 | CCTCGCCACCCAGGTGCACG |
| 6711 | CTCGCCACCCAGGTGCACGG |
| 6712 | TCGCCACCCAGGTGCACGGA |
| 6713 | CGCCACCCAGGTGCACGGAG |
| 6714 | GCCACCCAGGTGCACGGAGA |
| 6715 | CCACCCAGGTGCACGGAGAA |
| 6716 | CACCCAGGTGCACGGAGAAC |
| 6717 | ACCCAGGTGCACGGAGAACT |
| 6718 | CCCAGGTGCACGGAGAACTG |
| 6719 | CCAGGTGCACGGAGAACTGC |
| 6720 | CAGGTGCACGGAGAACTGCA |
| 6721 | AGGTGCACGGAGAACTGCAG |
| 6722 | GGTGCACGGAGAACTGCAGC |
| 6723 | GTGCACGGAGAACTGCAGCA |
| 6724 | TGCACGGAGAACTGCAGCAA |
| 6725 | GCACGGAGAACTGCAGCAAC |
| 6726 | CACGGAGAACTGCAGCAACT |
| 6727 | ACGGAGAACTGCAGCAACTC |
| 6728 | CGGAGAACTGCAGCAACTCG |
| 6729 | GGAGAACTGCAGCAACTCGG |
| 6730 | GAGAACTGCAGCAACTCGGC |
| 6731 | AGAACTGCAGCAACTCGGCG |
| 6732 | GAACTGCAGCAACTCGGCGT |
| 6733 | AACTGCAGCAACTCGGCGTT |
| 6734 | ACTGCAGCAACTCGGCGTTG |
| 6735 | CTGCAGCAACTCGGCGTTGC |
| 6736 | TGCAGCAACTCGGCGTTGCC |
| 6737 | GCAGCAACTCGGCGTTGCCA |
| 6738 | CAGCAACTCGGCGTTGCCAT |
| 6739 | AGCAACTCGGCGTTGCCATC |
| 6740 | GCAACTCGGCGTTGCCATCC |
| 6741 | CAACTCGGCGTTGCCATCCC |
| 6742 | AACTCGGCGTTGCCATCCCA |
| 6743 | ACTCGGCGTTGCCATCCCAG |
| 6744 | CTCGGCGTTGCCATCCCAGT |
| 6745 | TCGGCGTTGCCATCCCAGTC |
| 6746 | CGGCGTTGCCATCCCAGTCC |
| 6747 | GGCGTTGCCATCCCAGTCCC |
| 6748 | GCGTTGCCATCCCAGTCCCG |
| 6749 | CGTTGCCATCCCAGTCCCGC |
| 6750 | GTTGCCATCCCAGTCCCGCA |
| 6751 | TTGCCATCCCAGTCCCGCAG |
| 6752 | TGCCATCCCAGTCCCGCAGC |
| 6753 | GCCATCCCAGTCCCGCAGCT |
| 6754 | CCATCCCAGTCCCGCAGCTG |
| 6755 | CATCCCAGTCCCGCAGCTGC |
| 6756 | ATCCCAGTCCCGCAGCTGCA |
| 6757 | TCCCAGTCCCGCAGCTGCAC |
| 6758 | CCCAGTCCCGCAGCTGCACG |
| 6759 | CCAGTCCCGCAGCTGCACGG |
| 6760 | CAGTCCCGCAGCTGCACGGC |
| 6761 | AGTCCCGCAGCTGCACGGCC |
| 6762 | GTCCCGCAGCTGCACGGCCA |
| 6763 | TCCCGCAGCTGCACGGCCAG |
| 6764 | CCCGCAGCTGCACGGCCAGG |
| 6765 | CCGCAGCTGCACGGCCAGGC |
| 6766 | CGCAGCTGCACGGCCAGGCG |
| 6767 | GCAGCTGCACGGCCAGGCGG |
| 6768 | CAGCTGCACGGCCAGGCGGC |
| 6769 | AGCTGCACGGCCAGGCGGCT |
| 6770 | GCTGCACGGCCAGGCGGCTG |
| 6771 | CTGCACGGCCAGGCGGCTGT |
| 6772 | TGCACGGCCAGGCGGCTGTT |
| 6773 | GCACGGCCAGGCGGCTGTTG |
| 6774 | CACGGCCAGGCGGCTGTTGC |
| 6775 | ACGGCCAGGCGGCTGTTGCG |
| 6776 | CGGCCAGGCGGCTGTTGCGG |
| 6777 | GGCCAGGCGGCTGTTGCGGT |
| 6778 | GCCAGGCGGCTGTTGCGGTC |
| 6779 | CCAGGCGGCTGTTGCGGTCC |
| 6780 | CAGGCGGCTGTTGCGGTCCC |
| 6781 | AGGCGGCTGTTGCGGTCCCC |
| 6782 | GGCGGCTGTTGCGGTCCCCC |
| 6783 | GCGGCTGTTGCGGTCCCCCG |
| 6784 | CGGCTGTTGCGGTCCCCCGT |
| 6785 | GGCTGTTGCGGTCCCCCGTG |
| 6786 | GCTGTTGCGGTCCCCCGTGA |
| 6787 | CTGTTGCGGTCCCCCGTGAT |
| 6788 | TGTTGCGGTCCCCCGTGATG |
| 6789 | GTTGCGGTCCCCCGTGATGC |
| 6790 | TTGCGGTCCCCCGTGATGCT |
| 6791 | TGCGGTCCCCCGTGATGCTA |
| 6792 | GCGGTCCCCCGTGATGCTAT |
| 6793 | CGGTCCCCCGTGATGCTATG |
| 6794 | GGTCCCCCGTGATGCTATGC |
| 6795 | GTCCCCCGTGATGCTATGCA |
| 6796 | TCCCCCGTGATGCTATGCAC |
| 6797 | CCCCCGTGATGCTATGCACC |
| 6798 | CCCCGTGATGCTATGCACCT |
| 6799 | CCCGTGATGCTATGCACCTT |
| 6800 | CCGTGATGCTATGCACCTTC |
| 6801 | CGTGATGCTATGCACCTTCT |
| 6802 | GTGATGCTATGCACCTTCTC |
| 6803 | TGATGCTATGCACCTTCTCC |
| 6804 | GATGCTATGCACCTTCTCCA |
| 6805 | ATGCTATGCACCTTCTCCAG |
| 6806 | TGCTATGCACCTTCTCCAGA |
| 6807 | GCTATGCACCTTCTCCAGAC |
| 6808 | CTATGCACCTTCTCCAGACC |
| 6809 | TATGCACCTTCTCCAGACCC |
| 6810 | ATGCACCTTCTCCAGACCCA |
| 6811 | TGCACCTTCTCCAGACCCAG |
| 6812 | GCACCTTCTCCAGACCCAGC |
| 6813 | CACCTTCTCCAGACCCAGCC |
| 6814 | ACCTTCTCCAGACCCAGCCA |
| 6815 | CCTTCTCCAGACCCAGCCAG |
| 6816 | CTTCTCCAGACCCAGCCAGA |
| 6817 | TTCTCCAGACCCAGCCAGAA |
| 6818 | TCTCCAGACCCAGCCAGAAC |
| 6819 | CTCCAGACCCAGCCAGAACT |
| 6820 | TCCAGACCCAGCCAGAACTC |
| 6821 | CCAGACCCAGCCAGAACTCG |
| 6822 | CAGACCCAGCCAGAACTCGC |
| 6823 | AGACCCAGCCAGAACTCGCC |
| 6824 | GACCCAGCCAGAACTCGCCT |
| 6825 | ACCCAGCCAGAACTCGCCTG |
| 6826 | CCCAGCCAGAACTCGCCTGG |
| 6827 | CCAGCCAGAACTCGCCTGGA |
| 6828 | CAGCCAGAACTCGCCTGGAG |
| 6829 | AGCCAGAACTCGCCTGGAGT |
| 6830 | GCCAGAACTCGCCTGGAGTG |
| 6831 | CCAGAACTCGCCTGGAGTGG |
| 6832 | CAGAACTCGCCTGGAGTGGG |
| 6833 | AGAACTCGCCTGGAGTGGGA |
| 6834 | GAACTCGCCTGGAGTGGGAG |
| 6835 | AACTCGCCTGGAGTGGGAGA |
| 6836 | ACTCGCCTGGAGTGGGAGAG |
| 6837 | CTCGCCTGGAGTGGGAGAGG |
| 6838 | TCGCCTGGAGTGGGAGAGGC |
| 6839 | CGCCTGGAGTGGGAGAGGCC |
| 6840 | GCCTGGAGTGGGAGAGGCCA |
| 6841 | CCTGGAGTGGGAGAGGCCAC |
| 6842 | CTGGAGTGGGAGAGGCCACT |
| 6843 | TGGAGTGGGAGAGGCCACTC |
| 6844 | GGAGTGGGAGAGGCCACTCC |
| 6845 | GAGTGGGAGAGGCCACTCCA |
| 6846 | AGTGGGAGAGGCCACTCCAT |
| 6847 | GTGGGAGAGGCCACTCCATG |
| 6848 | TGGGAGAGGCCACTCCATGA |
| 6849 | GGGAGAGGCCACTCCATGAG |
| 6850 | GGAGAGGCCACTCCATGAGG |
| 6851 | GAGAGGCCACTCCATGAGGC |
| 6852 | AGAGGCCACTCCATGAGGCA |
| 6853 | GAGGCCACTCCATGAGGCAG |
| 6854 | AGGCCACTCCATGAGGCAGG |
| 6855 | GGCCACTCCATGAGGCAGGG |
| 6856 | GCCACTCCATGAGGCAGGGC |
| 6857 | CCACTCCATGAGGCAGGGCC |
| 6858 | CACTCCATGAGGCAGGGCCA |
| 6859 | ACTCCATGAGGCAGGGCCAC |
| 6860 | CTCCATGAGGCAGGGCCACT |
| 6861 | TCCATGAGGCAGGGCCACTT |
| 6862 | CCATGAGGCAGGGCCACTTC |
| 6863 | CATGAGGCAGGGCCACTTCT |
| 6864 | ATGAGGCAGGGCCACTTCTG |
| 6865 | TGAGGCAGGGCCACTTCTGA |
| 6866 | GAGGCAGGGCCACTTCTGAG |
| 6867 | AGGCAGGGCCACTTCTGAGG |
| 6868 | GGCAGGGCCACTTCTGAGGG |
| 6869 | GCAGGGCCACTTCTGAGGGT |
| 6870 | CAGGGCCACTTCTGAGGGTC |
| 6871 | AGGGCCACTTCTGAGGGTCC |
| 6872 | GGGCCACTTCTGAGGGTCCC |
| 6873 | GGCCACTTCTGAGGGTCCCT |
| 6874 | GCCACTTCTGAGGGTCCCTC |
| 6875 | CCACTTCTGAGGGTCCCTCT |
| 6876 | CACTTCTGAGGGTCCCTCTT |
| 6877 | ACTTCTGAGGGTCCCTCTTC |
| 6878 | CTTCTGAGGGTCCCTCTTCC |
| 6879 | TTCTGAGGGTCCCTCTTCCT |
| 6880 | TCTGAGGGTCCCTCTTCCTC |
| 6881 | CTGAGGGTCCCTCTTCCTCC |
| 6882 | TGAGGGTCCCTCTTCCTCCC |
| 6883 | GAGGGTCCCTCTTCCTCCCC |
| 6884 | AGGGTCCCTCTTCCTCCCCT |
| 6885 | GGGTCCCTCTTCCTCCCCTG |
| 6886 | GGTCCCTCTTCCTCCCCTGC |
| 6887 | GTCCCTCTTCCTCCCCTGCC |
| 6888 | TCCCTCTTCCTCCCCTGCCT |
| 6889 | CCCTCTTCCTCCCCTGCCTC |
| 6890 | CCTCTTCCTCCCCTGCCTCT |
| 6891 | CTCTTCCTCCCCTGCCTCTG |
| 6892 | TCTTCCTCCCCTGCCTCTGT |
| 6893 | CTTCCTCCCCTGCCTCTGTC |
| 6894 | TTCCTCCCCTGCCTCTGTCC |
| 6895 | TCCTCCCCTGCCTCTGTCCC |
| 6896 | CCTCCCCTGCCTCTGTCCCC |
| 6897 | CTCCCCTGCCTCTGTCCCCA |
| 6898 | TCCCCTGCCTCTGTCCCCAC |
| 6899 | CCCCTGCCTCTGTCCCCACT |
| 6900 | CCCTGCCTCTGTCCCCACTA |
| 6901 | CCTGCCTCTGTCCCCACTAG |
| 6902 | CTGCCTCTGTCCCCACTAGA |
| 6903 | TGCCTCTGTCCCCACTAGAA |
| 6904 | GCCTCTGTCCCCACTAGAAA |
| 6905 | CCTCTGTCCCCACTAGAAAC |
| 6906 | CTCTGTCCCCACTAGAAACA |
| 6907 | TCTGTCCCCACTAGAAACAC |
| 6908 | CTGTCCCCACTAGAAACACC |
| 6909 | TGTCCCCACTAGAAACACCT |
| 6910 | GTCCCCACTAGAAACACCTA |
| 6911 | TCCCCACTAGAAACACCTAC |
| 6912 | CCCCACTAGAAACACCTACC |
| 6913 | CCCACTAGAAACACCTACCG |
| 6914 | CCACTAGAAACACCTACCGT |
| 6915 | CACTAGAAACACCTACCGTG |
| 6916 | ACTAGAAACACCTACCGTGG |
| 6917 | CTAGAAACACCTACCGTGGG |
| 6918 | TAGAAACACCTACCGTGGGG |
| 6919 | AGAAACACCTACCGTGGGGA |
| 6920 | GAAACACCTACCGTGGGGAT |
| 6921 | AAACACCTACCGTGGGGATC |
| 6922 | AACACCTACCGTGGGGATCC |
| 6923 | ACACCTACCGTGGGGATCCC |
| 6924 | CACCTACCGTGGGGATCCCC |
| 6925 | ACCTACCGTGGGGATCCCCA |
| 6926 | CCTACCGTGGGGATCCCCAA |
| 6927 | CTACCGTGGGGATCCCCAAA |
| 6928 | TACCGTGGGGATCCCCAAAC |
| 6929 | ACCGTGGGGATCCCCAAACC |
| 6930 | CCGTGGGGATCCCCAAACCC |
| 6931 | CGTGGGGATCCCCAAACCCC |
| 6932 | GTGGGGATCCCCAAACCCCG |
| 6933 | TGGGGATCCCCAAACCCCGC |
| 6934 | GGGGATCCCCAAACCCCGCC |
| 6935 | GGGATCCCCAAACCCCGCCT |
| 6936 | GGATCCCCAAACCCCGCCTT |
| 6937 | GATCCCCAAACCCCGCCTTG |
| 6938 | ATCCCCAAACCCCGCCTTGT |
| 6939 | TCCCCAAACCCCGCCTTGTA |
| 6940 | CCCCAAACCCCGCCTTGTAG |
| 6941 | CCCAAACCCCGCCTTGTAGG |
| 6942 | CCAAACCCCGCCTTGTAGGC |
| 6943 | CAAACCCCGCCTTGTAGGCT |
| 6944 | AAACCCCGCCTTGTAGGCTT |
| 6945 | AACCCCGCCTTGTAGGCTTC |
| 6946 | ACCCCGCCTTGTAGGCTTCC |
| 6947 | CCCCGCCTTGTAGGCTTCCC |
| 6948 | CCCGCCTTGTAGGCTTCCCA |
| 6949 | CCGCCTTGTAGGCTTCCCAG |
| 6950 | CGCCTTGTAGGCTTCCCAGG |
| 6951 | GCCTTGTAGGCTTCCCAGGG |
| 6952 | CCTTGTAGGCTTCCCAGGGC |
| 6953 | CTTGTAGGCTTCCCAGGGCC |
| 6954 | TTGTAGGCTTCCCAGGGCCG |
| 6955 | TGTAGGCTTCCCAGGGCCGG |
| 6956 | GTAGGCTTCCCAGGGCCGGT |
| 6957 | TAGGCTTCCCAGGGCCGGTT |
| 6958 | AGGCTTCCCAGGGCCGGTTG |
| 6959 | GGCTTCCCAGGGCCGGTTGA |
| 6960 | GCTTCCCAGGGCCGGTTGAA |
| 6961 | CTTCCCAGGGCCGGTTGAAG |
| 6962 | TTCCCAGGGCCGGTTGAAGT |
| 6963 | TCCCAGGGCCGGTTGAAGTC |
| 6964 | CCCAGGGCCGGTTGAAGTCC |
| 6965 | CCAGGGCCGGTTGAAGTCCA |
| 6966 | CAGGGCCGGTTGAAGTCCAC |
| 6967 | AGGGCCGGTTGAAGTCCACT |
| 6968 | GGGCCGGTTGAAGTCCACTG |
| 6969 | GGCCGGTTGAAGTCCACTGA |
| 6970 | GCCGGTTGAAGTCCACTGAG |
| 6971 | CCGGTTGAAGTCCACTGAGC |
| 6972 | CGGTTGAAGTCCACTGAGCC |
| 6973 | GGTTGAAGTCCACTGAGCCA |
| 6974 | GTTGAAGTCCACTGAGCCAT |
| 6975 | TTGAAGTCCACTGAGCCATC |
| 6976 | TGAAGTCCACTGAGCCATCG |
| 6977 | GAAGTCCACTGAGCCATCGT |
| 6978 | AAGTCCACTGAGCCATCGTG |
| 6979 | AGTCCACTGAGCCATCGTGG |
| 6980 | GTCCACTGAGCCATCGTGGC |
| 6981 | TCCACTGAGCCATCGTGGCG |
| 6982 | CCACTGAGCCATCGTGGCGC |
| 6983 | CACTGAGCCATCGTGGCGCC |
| 6984 | ACTGAGCCATCGTGGCGCCT |
| 6985 | CTGAGCCATCGTGGCGCCTC |
| 6986 | TGAGCCATCGTGGCGCCTCT |
| 6987 | GAGCCATCGTGGCGCCTCTG |
| 6988 | AGCCATCGTGGCGCCTCTGA |
| 6989 | GCCATCGTGGCGCCTCTGAA |
| 6990 | CCATCGTGGCGCCTCTGAAT |
| 6991 | CATCGTGGCGCCTCTGAATT |
| 6992 | ATCGTGGCGCCTCTGAATTA |
| 6993 | TCGTGGCGCCTCTGAATTAC |
| 6994 | CGTGGCGCCTCTGAATTACT |
| 6995 | GTGGCGCCTCTGAATTACTG |
| 6996 | TGGCGCCTCTGAATTACTGT |
| 6997 | GGCGCCTCTGAATTACTGTC |
| 6998 | GCGCCTCTGAATTACTGTCC |
| 6999 | CGCCTCTGAATTACTGTCCA |
| 7000 | GCCTCTGAATTACTGTCCAG |
| 7001 | CCTCTGAATTACTGTCCAGC |
| 7002 | CTCTGAATTACTGTCCAGCC |
| 7003 | TCTGAATTACTGTCCAGCCT |
| 7004 | CTGAATTACTGTCCAGCCTC |
| 7005 | TGAATTACTGTCCAGCCTCC |
| 7006 | GAATTACTGTCCAGCCTCCA |
| 7007 | AATTACTGTCCAGCCTCCAT |
| 7008 | ATTACTGTCCAGCCTCCATC |
| 7009 | TTACTGTCCAGCCTCCATCT |
| 7010 | TACTGTCCAGCCTCCATCTG |
| 7011 | ACTGTCCAGCCTCCATCTGC |
| 7012 | CTGTCCAGCCTCCATCTGCC |
| 7013 | TGTCCAGCCTCCATCTGCCC |
| 7014 | GTCCAGCCTCCATCTGCCCA |
| 7015 | TCCAGCCTCCATCTGCCCAG |
| 7016 | CCAGCCTCCATCTGCCCAGA |
| 7017 | CAGCCTCCATCTGCCCAGAA |
| 7018 | AGCCTCCATCTGCCCAGAAA |
| 7019 | GCCTCCATCTGCCCAGAAAG |
| 7020 | CCTCCATCTGCCCAGAAAGG |
| 7021 | CTCCATCTGCCCAGAAAGGT |
| 7022 | TCCATCTGCCCAGAAAGGTA |
| 7023 | CCATCTGCCCAGAAAGGTAC |
| 7024 | CATCTGCCCAGAAAGGTACA |
| 7025 | ATCTGCCCAGAAAGGTACAA |
| 7026 | TCTGCCCAGAAAGGTACAAG |
| 7027 | CTGCCCAGAAAGGTACAAGG |
| 7028 | TGCCCAGAAAGGTACAAGGT |
| 7029 | GCCCAGAAAGGTACAAGGTC |
| 7030 | CCCAGAAAGGTACAAGGTCA |
| 7031 | CCAGAAAGGTACAAGGTCAC |
| 7032 | CAGAAAGGTACAAGGTCACC |
| 7033 | AGAAAGGTACAAGGTCACCA |
| 7034 | GAAAGGTACAAGGTCACCAG |
| 7035 | AAAGGTACAAGGTCACCAGG |
| 7036 | AAGGTACAAGGTCACCAGGA |
| 7037 | AGGTACAAGGTCACCAGGAA |
| 7038 | GGTACAAGGTCACCAGGAAG |
| 7039 | GTACAAGGTCACCAGGAAGT |
| 7040 | TACAAGGTCACCAGGAAGTC |
| 7041 | ACAAGGTCACCAGGAAGTCC |
| 7042 | CAAGGTCACCAGGAAGTCCC |
| 7043 | AAGGTCACCAGGAAGTCCCT |
| 7044 | AGGTCACCAGGAAGTCCCTC |
| 7045 | GGTCACCAGGAAGTCCCTCT |
| 7046 | GTCACCAGGAAGTCCCTCTT |
| 7047 | TCACCAGGAAGTCCCTCTTC |
| 7048 | CACCAGGAAGTCCCTCTTCA |
| 7049 | ACCAGGAAGTCCCTCTTCAC |
| 7050 | CCAGGAAGTCCCTCTTCACA |
| 7051 | CAGGAAGTCCCTCTTCACAG |
| 7052 | AGGAAGTCCCTCTTCACAGA |
| 7053 | GGAAGTCCCTCTTCACAGAC |
| 7054 | GAAGTCCCTCTTCACAGACG |
| 7055 | AAGTCCCTCTTCACAGACGA |
| 7056 | AGTCCCTCTTCACAGACGAC |
| 7057 | GTCCCTCTTCACAGACGACC |
| 7058 | TCCCTCTTCACAGACGACCC |
| 7059 | CCCTCTTCACAGACGACCCC |
| 7060 | CCTCTTCACAGACGACCCCA |
| 7061 | CTCTTCACAGACGACCCCAC |
| 7062 | TCTTCACAGACGACCCCACT |
| 7063 | CTTCACAGACGACCCCACTC |
| 7064 | TTCACAGACGACCCCACTCC |
| 7065 | TCACAGACGACCCCACTCCC |
| 7066 | CACAGACGACCCCACTCCCT |
| 7067 | ACAGACGACCCCACTCCCTC |
| 7068 | CAGACGACCCCACTCCCTCA |
| 7069 | AGACGACCCCACTCCCTCAT |
| 7070 | GACGACCCCACTCCCTCATC |
| 7071 | ACGACCCCACTCCCTCATCT |
| 7072 | CGACCCCACTCCCTCATCTG |
| 7073 | GACCCCACTCCCTCATCTGG |
| 7074 | ACCCCACTCCCTCATCTGGC |
| 7075 | CCCCACTCCCTCATCTGGCT |
| 7076 | CCCACTCCCTCATCTGGCTG |
| 7077 | CCACTCCCTCATCTGGCTGC |
| 7078 | CACTCCCTCATCTGGCTGCC |
| 7079 | ACTCCCTCATCTGGCTGCCA |
| 7080 | CTCCCTCATCTGGCTGCCAA |
| 7081 | TCCCTCATCTGGCTGCCAAG |
| 7082 | CCCTCATCTGGCTGCCAAGC |
| 7083 | CCTCATCTGGCTGCCAAGCA |
| 7084 | CTCATCTGGCTGCCAAGCAC |
| 7085 | TCATCTGGCTGCCAAGCACC |
| 7086 | CATCTGGCTGCCAAGCACCA |
| 7087 | ATCTGGCTGCCAAGCACCAA |
| 7088 | TCTGGCTGCCAAGCACCAAA |
| 7089 | CTGGCTGCCAAGCACCAAAC |
| 7090 | TGGCTGCCAAGCACCAAACC |
| 7091 | GGCTGCCAAGCACCAAACCC |
| 7092 | GCTGCCAAGCACCAAACCCC |
| 7093 | CTGCCAAGCACCAAACCCCC |
| 7094 | TGCCAAGCACCAAACCCCCT |
| 7095 | GCCAAGCACCAAACCCCCTC |
| 7096 | CCAAGCACCAAACCCCCTCC |
| 7097 | CAAGCACCAAACCCCCTCCA |
| 7098 | AAGCACCAAACCCCCTCCAA |
| 7099 | AGCACCAAACCCCCTCCAAA |
| 7100 | GCACCAAACCCCCTCCAAAC |
| 7101 | CACCAAACCCCCTCCAAACC |
| 7102 | ACCAAACCCCCTCCAAACCC |
| 7103 | CCAAACCCCCTCCAAACCCA |
| 7104 | CAAACCCCCTCCAAACCCAG |
| 7105 | AAACCCCCTCCAAACCCAGG |
| 7106 | AACCCCCTCCAAACCCAGGA |
| 7107 | ACCCCCTCCAAACCCAGGAA |
| 7108 | CCCCCTCCAAACCCAGGAAG |
| 7109 | CCCCTCCAAACCCAGGAAGA |
| 7110 | CCCTCCAAACCCAGGAAGAC |
| 7111 | CCTCCAAACCCAGGAAGACA |
| 7112 | CTCCAAACCCAGGAAGACAG |
| 7113 | TCCAAACCCAGGAAGACAGC |
| 7114 | CCAAACCCAGGAAGACAGCA |
| 7115 | CAAACCCAGGAAGACAGCAG |
| 7116 | AAACCCAGGAAGACAGCAGC |
| 7117 | AACCCAGGAAGACAGCAGCT |
| 7118 | ACCCAGGAAGACAGCAGCTC |
| 7119 | CCCAGGAAGACAGCAGCTCC |
| 7120 | CCAGGAAGACAGCAGCTCCC |
| 7121 | CAGGAAGACAGCAGCTCCCT |
| 7122 | AGGAAGACAGCAGCTCCCTC |
| 7123 | GGAAGACAGCAGCTCCCTCA |
| 7124 | GAAGACAGCAGCTCCCTCAC |
| 7125 | AAGACAGCAGCTCCCTCACT |
| 7126 | AGACAGCAGCTCCCTCACTC |
| 7127 | GACAGCAGCTCCCTCACTCA |
| 7128 | ACAGCAGCTCCCTCACTCAT |
| 7129 | CAGCAGCTCCCTCACTCATC |
| 7130 | AGCAGCTCCCTCACTCATCC |
| 7131 | GCAGCTCCCTCACTCATCCC |
| 7132 | CAGCTCCCTCACTCATCCCT |
| 7133 | AGCTCCCTCACTCATCCCTG |
| 7134 | GCTCCCTCACTCATCCCTGG |
| 7135 | CTCCCTCACTCATCCCTGGA |
| 7136 | TCCCTCACTCATCCCTGGAG |
| 7137 | CCCTCACTCATCCCTGGAGG |
| 7138 | CCTCACTCATCCCTGGAGGA |
| 7139 | CTCACTCATCCCTGGAGGAC |
| 7140 | TCACTCATCCCTGGAGGACT |
| 7141 | CACTCATCCCTGGAGGACTC |
| 7142 | ACTCATCCCTGGAGGACTCG |
| 7143 | CTCATCCCTGGAGGACTCGA |
| 7144 | TCATCCCTGGAGGACTCGAG |
| 7145 | CATCCCTGGAGGACTCGAGG |
| 7146 | ATCCCTGGAGGACTCGAGGA |
| 7147 | TCCCTGGAGGACTCGAGGAG |
| 7148 | CCCTGGAGGACTCGAGGAGG |
| 7149 | CCTGGAGGACTCGAGGAGGG |
| 7150 | CTGGAGGACTCGAGGAGGGT |
| 7151 | TGGAGGACTCGAGGAGGGTG |
| 7152 | GGAGGACTCGAGGAGGGTGG |
| 7153 | GAGGACTCGAGGAGGGTGGG |
| 7154 | AGGACTCGAGGAGGGTGGGT |
| 7155 | GGACTCGAGGAGGGTGGGTC |
| 7156 | GACTCGAGGAGGGTGGGTCA |
| 7157 | ACTCGAGGAGGGTGGGTCAG |
| 7158 | CTCGAGGAGGGTGGGTCAGA |
| 7159 | TCGAGGAGGGTGGGTCAGAG |
| 7160 | CGAGGAGGGTGGGTCAGAGG |
| 7161 | GAGGAGGGTGGGTCAGAGGG |
| 7162 | AGGAGGGTGGGTCAGAGGGA |
| 7163 | GGAGGGTGGGTCAGAGGGAG |
| 7164 | GAGGGTGGGTCAGAGGGAGG |
| 7165 | AGGGTGGGTCAGAGGGAGGA |
| 7166 | GGGTGGGTCAGAGGGAGGAA |
| 7167 | GGTGGGTCAGAGGGAGGAAT |
| 7168 | GTGGGTCAGAGGGAGGAATA |
| 7169 | TGGGTCAGAGGGAGGAATAT |
| 7170 | GGGTCAGAGGGAGGAATATT |
| 7171 | GGTCAGAGGGAGGAATATTA |
| 7172 | GTCAGAGGGAGGAATATTAT |
| 7173 | TCAGAGGGAGGAATATTATG |
| 7174 | CAGAGGGAGGAATATTATGG |
| 7175 | AGAGGGAGGAATATTATGGG |
| 7176 | GAGGGAGGAATATTATGGGC |
| 7177 | AGGGAGGAATATTATGGGCT |
| 7178 | GGGAGGAATATTATGGGCTG |
| 7179 | GGAGGAATATTATGGGCTGG |
| 7180 | GAGGAATATTATGGGCTGGC |
| 7181 | AGGAATATTATGGGCTGGCC |
| 7182 | GGAATATTATGGGCTGGCCT |
| 7183 | GAATATTATGGGCTGGCCTT |
| 7184 | AATATTATGGGCTGGCCTTG |
| 7185 | ATATTATGGGCTGGCCTTGG |
| 7186 | TATTATGGGCTGGCCTTGGG |
| 7187 | ATTATGGGCTGGCCTTGGGA |
| 7188 | TTATGGGCTGGCCTTGGGAA |
| 7189 | TATGGGCTGGCCTTGGGAAG |
| 7190 | ATGGGCTGGCCTTGGGAAGA |
| 7191 | TGGGCTGGCCTTGGGAAGAT |
| 7192 | GGGCTGGCCTTGGGAAGATC |
| 7193 | GGCTGGCCTTGGGAAGATCT |
| 7194 | GCTGGCCTTGGGAAGATCTT |
| 7195 | CTGGCCTTGGGAAGATCTTT |
| 7196 | TGGCCTTGGGAAGATCTTTG |
| 7197 | GGCCTTGGGAAGATCTTTGT |
| 7198 | GCCTTGGGAAGATCTTTGTC |
| 7199 | CCTTGGGAAGATCTTTGTCC |
| 7200 | CTTGGGAAGATCTTTGTCCC |
| 7201 | TTGGGAAGATCTTTGTCCCA |
| 7202 | TGGGAAGATCTTTGTCCCAA |
| 7203 | GGGAAGATCTTTGTCCCAAG |
| 7204 | GGAAGATCTTTGTCCCAAGA |
| 7205 | GAAGATCTTTGTCCCAAGAA |
| 7206 | AAGATCTTTGTCCCAAGAAC |
| 7207 | AGATCTTTGTCCCAAGAACC |
| 7208 | GATCTTTGTCCCAAGAACCC |
| 7209 | ATCTTTGTCCCAAGAACCCA |
| 7210 | TCTTTGTCCCAAGAACCCAG |
| 7211 | CTTTGTCCCAAGAACCCAGC |
| 7212 | TTTGTCCCAAGAACCCAGCA |
| 7213 | TTGTCCCAAGAACCCAGCAG |
| 7214 | TGTCCCAAGAACCCAGCAGG |
| 7215 | GTCCCAAGAACCCAGCAGGG |
| 7216 | TCCCAAGAACCCAGCAGGGA |
| 7217 | CCCAAGAACCCAGCAGGGAC |
| 7218 | CCAAGAACCCAGCAGGGACT |
| 7219 | CAAGAACCCAGCAGGGACTG |
| 7220 | AAGAACCCAGCAGGGACTGA |
| 7221 | AGAACCCAGCAGGGACTGAG |
| 7222 | GAACCCAGCAGGGACTGAGT |
| 7223 | AACCCAGCAGGGACTGAGTG |
| 7224 | ACCCAGCAGGGACTGAGTGT |
| 7225 | CCCAGCAGGGACTGAGTGTG |
| 7226 | CCAGCAGGGACTGAGTGTGG |
| 7227 | CAGCAGGGACTGAGTGTGGG |
| 7228 | AGCAGGGACTGAGTGTGGGA |
| 7229 | GCAGGGACTGAGTGTGGGAG |
| 7230 | CAGGGACTGAGTGTGGGAGG |
| 7231 | AGGGACTGAGTGTGGGAGGG |
| 7232 | GGGACTGAGTGTGGGAGGGA |
| 7233 | GGACTGAGTGTGGGAGGGAG |
| 7234 | GACTGAGTGTGGGAGGGAGT |
| 7235 | ACTGAGTGTGGGAGGGAGTA |
| 7236 | CTGAGTGTGGGAGGGAGTAG |
| 7237 | TGAGTGTGGGAGGGAGTAGG |
| 7238 | GAGTGTGGGAGGGAGTAGGC |
| 7239 | AGTGTGGGAGGGAGTAGGCA |
| 7240 | GTGTGGGAGGGAGTAGGCAG |
| 7241 | TGTGGGAGGGAGTAGGCAGT |
| 7242 | GTGGGAGGGAGTAGGCAGTG |
| 7243 | TGGGAGGGAGTAGGCAGTGG |
| 7244 | GGGAGGGAGTAGGCAGTGGA |
| 7245 | GGAGGGAGTAGGCAGTGGAA |
| 7246 | GAGGGAGTAGGCAGTGGAAA |
| 7247 | AGGGAGTAGGCAGTGGAAAT |
| 7248 | GGGAGTAGGCAGTGGAAATC |
| 7249 | GGAGTAGGCAGTGGAAATCT |
| 7250 | GAGTAGGCAGTGGAAATCTG |
| 7251 | AGTAGGCAGTGGAAATCTGC |
| 7252 | GTAGGCAGTGGAAATCTGCA |
| 7253 | TAGGCAGTGGAAATCTGCAA |
| 7254 | AGGCAGTGGAAATCTGCAAA |
| 7255 | GGCAGTGGAAATCTGCAAAG |
| 7256 | GCAGTGGAAATCTGCAAAGC |
| 7257 | CAGTGGAAATCTGCAAAGCC |
| 7258 | AGTGGAAATCTGCAAAGCCT |
| 7259 | GTGGAAATCTGCAAAGCCTC |
| 7260 | TGGAAATCTGCAAAGCCTCT |
| 7261 | GGAAATCTGCAAAGCCTCTC |
| 7262 | GAAATCTGCAAAGCCTCTCT |
| 7263 | AAATCTGCAAAGCCTCTCTG |
| 7264 | AATCTGCAAAGCCTCTCTGG |
| 7265 | ATCTGCAAAGCCTCTCTGGG |
| 7266 | TCTGCAAAGCCTCTCTGGGC |
| 7267 | CTGCAAAGCCTCTCTGGGCC |
| 7268 | TGCAAAGCCTCTCTGGGCCA |
| 7269 | GCAAAGCCTCTCTGGGCCAG |
| 7270 | CAAAGCCTCTCTGGGCCAGC |
| 7271 | AAAGCCTCTCTGGGCCAGCT |
| 7272 | AAGCCTCTCTGGGCCAGCTG |
| 7273 | AGCCTCTCTGGGCCAGCTGA |
| 7274 | GCCTCTCTGGGCCAGCTGAA |
| 7275 | CCTCTCTGGGCCAGCTGAAC |
| 7276 | CTCTCTGGGCCAGCTGAACT |
| 7277 | TCTCTGGGCCAGCTGAACTG |
| 7278 | CTCTGGGCCAGCTGAACTGG |
| 7279 | TCTGGGCCAGCTGAACTGGG |
| 7280 | CTGGGCCAGCTGAACTGGGT |
| 7281 | TGGGCCAGCTGAACTGGGTA |
| 7282 | GGGCCAGCTGAACTGGGTAA |
| 7283 | GGCCAGCTGAACTGGGTAAA |
| 7284 | GCCAGCTGAACTGGGTAAAA |
| 7285 | CCAGCTGAACTGGGTAAAAC |
| 7286 | CAGCTGAACTGGGTAAAACC |
| 7287 | AGCTGAACTGGGTAAAACCC |
| 7288 | GCTGAACTGGGTAAAACCCC |
| 7289 | CTGAACTGGGTAAAACCCCG |
| 7290 | TGAACTGGGTAAAACCCCGT |
| 7291 | GAACTGGGTAAAACCCCGTG |
| 7292 | AACTGGGTAAAACCCCGTGT |
| 7293 | ACTGGGTAAAACCCCGTGTT |
| 7294 | CTGGGTAAAACCCCGTGTTG |
| 7295 | TGGGTAAAACCCCGTGTTGT |
| 7296 | GGGTAAAACCCCGTGTTGTA |
| 7297 | GGTAAAACCCCGTGTTGTAA |
| 7298 | GTAAAACCCCGTGTTGTAAC |
| 7299 | TAAAACCCCGTGTTGTAACC |
| 7300 | AAAACCCCGTGTTGTAACCT |
| 7301 | AAACCCCGTGTTGTAACCTC |
| 7302 | AACCCCGTGTTGTAACCTCT |
| 7303 | ACCCCGTGTTGTAACCTCTT |
| 7304 | CCCCGTGTTGTAACCTCTTG |
| 7305 | CCCGTGTTGTAACCTCTTGT |
| 7306 | CCGTGTTGTAACCTCTTGTA |
| 7307 | CGTGTTGTAACCTCTTGTAA |
| 7308 | GTGTTGTAACCTCTTGTAAT |
| 7309 | TGTTGTAACCTCTTGTAATG |
| 7310 | GTTGTAACCTCTTGTAATGG |
| 7311 | TTGTAACCTCTTGTAATGGA |
| 7312 | TGTAACCTCTTGTAATGGAA |
| 7313 | GTAACCTCTTGTAATGGAAA |
| 7314 | TAACCTCTTGTAATGGAAAG |
| 7315 | AACCTCTTGTAATGGAAAGG |
| 7316 | ACCTCTTGTAATGGAAAGGA |
| 7317 | CCTCTTGTAATGGAAAGGAC |
| 7318 | CTCTTGTAATGGAAAGGACT |
| 7319 | TCTTGTAATGGAAAGGACTT |
| 7320 | CTTGTAATGGAAAGGACTTC |
| 7321 | TTGTAATGGAAAGGACTTCT |
| 7322 | TGTAATGGAAAGGACTTCTC |
| 7323 | GTAATGGAAAGGACTTCTCA |
| 7324 | TAATGGAAAGGACTTCTCAG |
| 7325 | AATGGAAAGGACTTCTCAGT |
| 7326 | ATGGAAAGGACTTCTCAGTG |
| 7327 | TGGAAAGGACTTCTCAGTGG |
| 7328 | GGAAAGGACTTCTCAGTGGA |
| 7329 | GAAAGGACTTCTCAGTGGAA |
| 7330 | AAAGGACTTCTCAGTGGAAA |
| 7331 | AAGGACTTCTCAGTGGAAAA |
| 7332 | AGGACTTCTCAGTGGAAAAA |
| 7333 | GGACTTCTCAGTGGAAAAAA |
| 7334 | GACTTCTCAGTGGAAAAAAA |
| 7335 | ACTTCTCAGTGGAAAAAAAA |
| 7336 | CTTCTCAGTGGAAAAAAAAG |
| 7337 | TTCTCAGTGGAAAAAAAAGC |
| 7338 | TCTCAGTGGAAAAAAAAGCT |
| 7339 | CTCAGTGGAAAAAAAAGCTT |
| 7340 | TCAGTGGAAAAAAAAGCTTT |
| 7341 | CAGTGGAAAAAAAAGCTTTC |
| 7342 | AGTGGAAAAAAAAGCTTTCT |
| 7343 | GTGGAAAAAAAAGCTTTCTT |
| 7344 | TGGAAAAAAAAGCTTTCTTT |
| 7345 | GGAAAAAAAAGCTTTCTTTT |
| 7346 | GAAAAAAAAGCTTTCTTTTT |
| 7347 | AAAAAAAAGCTTTCTTTTTT |
| 7348 | AAAAAAAGCTTTCTTTTTTT |
| 7349 | AAAAAAGCTTTCTTTTTTTT |
| 7350 | AAAAAGCTTTCTTTTTTTTT |
| 7351 | AAAAGCTTTCTTTTTTTTTT |
| 7352 | AAAGCTTTCTTTTTTTTTTT |
| 7353 | AAGCTTTCTTTTTTTTTTTT |
| 7354 | AGCTTTCTTTTTTTTTTTTT |
| 7355 | GCTTTCTTTTTTTTTTTTTT |
| 7356 | CTTTCTTTTTTTTTTTTTTT |
| 7357 | TTTCTTTTTTTTTTTTTTTT |
| 7358 | TTCTTTTTTTTTTTTTTTTT |
| 7359 | TCTTTTTTTTTTTTTTTTTT |
| 7360 | CTTTTTTTTTTTTTTTTTTT |
| 7361 | TTTTTTTTTTTTTTTTTTTT |
| 7362 | TTTTTTTTTTTTTTTTTTTT |
| 7363 | TTTTTTTTTTTTTTTTTTTA |
| 7364 | TTTTTTTTTTTTTTTTTTAG |
| 7365 | TTTTTTTTTTTTTTTTTAGA |
| 7366 | TTTTTTTTTTTTTTTTAGAG |
| 7367 | TTTTTTTTTTTTTTTAGAGA |
| 7368 | TTTTTTTTTTTTTTAGAGAT |
| 7369 | TTTTTTTTTTTTTAGAGATG |
| 7370 | TTTTTTTTTTTTAGAGATGG |
| 7371 | TTTTTTTTTTTAGAGATGGA |
| 7372 | TTTTTTTTTTAGAGATGGAG |
| 7373 | TTTTTTTTTAGAGATGGAGT |
| 7374 | TTTTTTTTAGAGATGGAGTC |
| 7375 | TTTTTTTAGAGATGGAGTCT |
| 7376 | TTTTTTAGAGATGGAGTCTC |
| 7377 | TTTTTAGAGATGGAGTCTCA |
| 7378 | TTTTAGAGATGGAGTCTCAC |
| 7379 | TTTAGAGATGGAGTCTCACT |
| 7380 | TTAGAGATGGAGTCTCACTC |
| 7381 | TAGAGATGGAGTCTCACTCT |
| 7382 | AGAGATGGAGTCTCACTCTG |
| 7383 | GAGATGGAGTCTCACTCTGT |
| 7384 | AGATGGAGTCTCACTCTGTT |
| 7385 | GATGGAGTCTCACTCTGTTG |
| 7386 | ATGGAGTCTCACTCTGTTGC |
| 7387 | TGGAGTCTCACTCTGTTGCC |
| 7388 | GGAGTCTCACTCTGTTGCCC |
| 7389 | GAGTCTCACTCTGTTGCCCA |
| 7390 | AGTCTCACTCTGTTGCCCAG |
| 7391 | GTCTCACTCTGTTGCCCAGG |
| 7392 | TCTCACTCTGTTGCCCAGGC |
| 7393 | CTCACTCTGTTGCCCAGGCT |
| 7394 | TCACTCTGTTGCCCAGGCTG |
| 7395 | CACTCTGTTGCCCAGGCTGG |
| 7396 | ACTCTGTTGCCCAGGCTGGA |
| 7397 | CTCTGTTGCCCAGGCTGGAT |
| 7398 | TCTGTTGCCCAGGCTGGATC |
| 7399 | CTGTTGCCCAGGCTGGATCG |
| 7400 | TGTTGCCCAGGCTGGATCGC |
| 7401 | GTTGCCCAGGCTGGATCGCA |
| 7402 | TTGCCCAGGCTGGATCGCAG |
| 7403 | TGCCCAGGCTGGATCGCAGT |
| 7404 | GCCCAGGCTGGATCGCAGTG |
| 7405 | CCCAGGCTGGATCGCAGTGC |
| 7406 | CCAGGCTGGATCGCAGTGCC |
| 7407 | CAGGCTGGATCGCAGTGCCG |
| 7408 | AGGCTGGATCGCAGTGCCGC |
| 7409 | GGCTGGATCGCAGTGCCGCA |
| 7410 | GCTGGATCGCAGTGCCGCAA |
| 7411 | CTGGATCGCAGTGCCGCAAT |
| 7412 | TGGATCGCAGTGCCGCAATC |
| 7413 | GGATCGCAGTGCCGCAATCT |
| 7414 | GATCGCAGTGCCGCAATCTC |
| 7415 | ATCGCAGTGCCGCAATCTCA |
| 7416 | TCGCAGTGCCGCAATCTCAG |
| 7417 | CGCAGTGCCGCAATCTCAGC |
| 7418 | GCAGTGCCGCAATCTCAGCT |
| 7419 | CAGTGCCGCAATCTCAGCTC |
| 7420 | AGTGCCGCAATCTCAGCTCA |
| 7421 | GTGCCGCAATCTCAGCTCAC |
| 7422 | TGCCGCAATCTCAGCTCACT |
| 7423 | GCCGCAATCTCAGCTCACTG |
| 7424 | CCGCAATCTCAGCTCACTGC |
| 7425 | CGCAATCTCAGCTCACTGCA |
| 7426 | GCAATCTCAGCTCACTGCAA |
| 7427 | CAATCTCAGCTCACTGCAAC |
| 7428 | AATCTCAGCTCACTGCAACC |
| 7429 | ATCTCAGCTCACTGCAACCT |
| 7430 | TCTCAGCTCACTGCAACCTC |
| 7431 | CTCAGCTCACTGCAACCTCT |
| 7432 | TCAGCTCACTGCAACCTCTG |
| 7433 | CAGCTCACTGCAACCTCTGC |
| 7434 | AGCTCACTGCAACCTCTGCC |
| 7435 | GCTCACTGCAACCTCTGCCT |
| 7436 | CTCACTGCAACCTCTGCCTT |
| 7437 | TCACTGCAACCTCTGCCTTC |
| 7438 | CACTGCAACCTCTGCCTTCG |
| 7439 | ACTGCAACCTCTGCCTTCGG |
| 7440 | CTGCAACCTCTGCCTTCGGG |
| 7441 | TGCAACCTCTGCCTTCGGGG |
| 7442 | GCAACCTCTGCCTTCGGGGC |
| 7443 | CAACCTCTGCCTTCGGGGCT |
| 7444 | AACCTCTGCCTTCGGGGCTC |
| 7445 | ACCTCTGCCTTCGGGGCTCA |
| 7446 | CCTCTGCCTTCGGGGCTCAA |
| 7447 | CTCTGCCTTCGGGGCTCAAG |
| 7448 | TCTGCCTTCGGGGCTCAAGC |
| 7449 | CTGCCTTCGGGGCTCAAGCG |
| 7450 | TGCCTTCGGGGCTCAAGCGA |
| 7451 | GCCTTCGGGGCTCAAGCGAT |
| 7452 | CCTTCGGGGCTCAAGCGATT |
| 7453 | CTTCGGGGCTCAAGCGATTC |
| 7454 | TTCGGGGCTCAAGCGATTCT |
| 7455 | TCGGGGCTCAAGCGATTCTT |
| 7456 | CGGGGCTCAAGCGATTCTTG |
| 7457 | GGGGCTCAAGCGATTCTTGT |
| 7458 | GGGCTCAAGCGATTCTTGTG |
| 7459 | GGCTCAAGCGATTCTTGTGC |
| 7460 | GCTCAAGCGATTCTTGTGCT |
| 7461 | CTCAAGCGATTCTTGTGCTT |
| 7462 | TCAAGCGATTCTTGTGCTTC |
| 7463 | CAAGCGATTCTTGTGCTTCA |
| 7464 | AAGCGATTCTTGTGCTTCAG |
| 7465 | AGCGATTCTTGTGCTTCAGC |
| 7466 | GCGATTCTTGTGCTTCAGCC |
| 7467 | CGATTCTTGTGCTTCAGCCC |
| 7468 | GATTCTTGTGCTTCAGCCCC |
| 7469 | ATTCTTGTGCTTCAGCCCCA |
| 7470 | TTCTTGTGCTTCAGCCCCAC |
| 7471 | TCTTGTGCTTCAGCCCCACA |
| 7472 | CTTGTGCTTCAGCCCCACAA |
| 7473 | TTGTGCTTCAGCCCCACAAG |
| 7474 | TGTGCTTCAGCCCCACAAGC |
| 7475 | GTGCTTCAGCCCCACAAGCA |
| 7476 | TGCTTCAGCCCCACAAGCAG |
| 7477 | GCTTCAGCCCCACAAGCAGC |
| 7478 | CTTCAGCCCCACAAGCAGCT |
| 7479 | TTCAGCCCCACAAGCAGCTG |
| 7480 | TCAGCCCCACAAGCAGCTGG |
| 7481 | CAGCCCCACAAGCAGCTGGA |
| 7482 | AGCCCCACAAGCAGCTGGAA |
| 7483 | GCCCCACAAGCAGCTGGAAT |
| 7484 | CCCCACAAGCAGCTGGAATC |
| 7485 | CCCACAAGCAGCTGGAATCA |
| 7486 | CCACAAGCAGCTGGAATCAC |
| 7487 | CACAAGCAGCTGGAATCACA |
| 7488 | ACAAGCAGCTGGAATCACAG |
| 7489 | CAAGCAGCTGGAATCACAGG |
| 7490 | AAGCAGCTGGAATCACAGGC |
| 7491 | AGCAGCTGGAATCACAGGCA |
| 7492 | GCAGCTGGAATCACAGGCAC |
| 7493 | CAGCTGGAATCACAGGCACG |
| 7494 | AGCTGGAATCACAGGCACGC |
| 7495 | GCTGGAATCACAGGCACGCC |
| 7496 | CTGGAATCACAGGCACGCCC |
| 7497 | TGGAATCACAGGCACGCCCG |
| 7498 | GGAATCACAGGCACGCCCGG |
| 7499 | GAATCACAGGCACGCCCGGC |
| 7500 | AATCACAGGCACGCCCGGCT |
| 7501 | ATCACAGGCACGCCCGGCTA |
| 7502 | TCACAGGCACGCCCGGCTAA |
| 7503 | CACAGGCACGCCCGGCTAAT |
| 7504 | ACAGGCACGCCCGGCTAATG |
| 7505 | CAGGCACGCCCGGCTAATGT |
| 7506 | AGGCACGCCCGGCTAATGTT |
| 7507 | GGCACGCCCGGCTAATGTTT |
| 7508 | GCACGCCCGGCTAATGTTTA |
| 7509 | CACGCCCGGCTAATGTTTAT |
| 7510 | ACGCCCGGCTAATGTTTATG |
| 7511 | CGCCCGGCTAATGTTTATGT |
| 7512 | GCCCGGCTAATGTTTATGTT |
| 7513 | CCCGGCTAATGTTTATGTTG |
| 7514 | CCGGCTAATGTTTATGTTGG |
| 7515 | CGGCTAATGTTTATGTTGGT |
| 7516 | GGCTAATGTTTATGTTGGTA |
| 7517 | GCTAATGTTTATGTTGGTAG |
| 7518 | CTAATGTTTATGTTGGTAGA |
| 7519 | TAATGTTTATGTTGGTAGAG |
| 7520 | AATGTTTATGTTGGTAGAGA |
| 7521 | ATGTTTATGTTGGTAGAGAT |
| 7522 | TGTTTATGTTGGTAGAGATA |
| 7523 | GTTTATGTTGGTAGAGATAG |
| 7524 | TTTATGTTGGTAGAGATAGG |
| 7525 | TTATGTTGGTAGAGATAGGG |
| 7526 | TATGTTGGTAGAGATAGGGT |
| 7527 | ATGTTGGTAGAGATAGGGTT |
| 7528 | TGTTGGTAGAGATAGGGTTT |
| 7529 | GTTGGTAGAGATAGGGTTTC |
| 7530 | TTGGTAGAGATAGGGTTTCA |
| 7531 | TGGTAGAGATAGGGTTTCAC |
| 7532 | GGTAGAGATAGGGTTTCACC |
| 7533 | GTAGAGATAGGGTTTCACCA |
| 7534 | TAGAGATAGGGTTTCACCAT |
| 7535 | AGAGATAGGGTTTCACCATG |
| 7536 | GAGATAGGGTTTCACCATGT |
| 7537 | AGATAGGGTTTCACCATGTT |
| 7538 | GATAGGGTTTCACCATGTTG |
| 7539 | ATAGGGTTTCACCATGTTGG |
| 7540 | TAGGGTTTCACCATGTTGGC |
| 7541 | AGGGTTTCACCATGTTGGCC |
| 7542 | GGGTTTCACCATGTTGGCCA |
| 7543 | GGTTTCACCATGTTGGCCAG |
| 7544 | GTTTCACCATGTTGGCCAGG |
| 7545 | TTTCACCATGTTGGCCAGGC |
| 7546 | TTCACCATGTTGGCCAGGCT |
| 7547 | TCACCATGTTGGCCAGGCTG |
| 7548 | CACCATGTTGGCCAGGCTGG |
| 7549 | ACCATGTTGGCCAGGCTGGT |
| 7550 | CCATGTTGGCCAGGCTGGTC |
| 7551 | CATGTTGGCCAGGCTGGTCT |
| 7552 | ATGTTGGCCAGGCTGGTCTT |
| 7553 | TGTTGGCCAGGCTGGTCTTG |
| 7554 | GTTGGCCAGGCTGGTCTTGA |
| 7555 | TTGGCCAGGCTGGTCTTGAA |
| 7556 | TGGCCAGGCTGGTCTTGAAC |
| 7557 | GGCCAGGCTGGTCTTGAACT |
| 7558 | GCCAGGCTGGTCTTGAACTT |
| 7559 | CCAGGCTGGTCTTGAACTTC |
| 7560 | CAGGCTGGTCTTGAACTTCT |
| 7561 | AGGCTGGTCTTGAACTTCTG |
| 7562 | GGCTGGTCTTGAACTTCTGA |
| 7563 | GCTGGTCTTGAACTTCTGAC |
| 7564 | CTGGTCTTGAACTTCTGACC |
| 7565 | TGGTCTTGAACTTCTGACCT |
| 7566 | GGTCTTGAACTTCTGACCTC |
| 7567 | GTCTTGAACTTCTGACCTCA |
| 7568 | TCTTGAACTTCTGACCTCAA |
| 7569 | CTTGAACTTCTGACCTCAAG |
| 7570 | TTGAACTTCTGACCTCAAGT |
| 7571 | TGAACTTCTGACCTCAAGTG |
| 7572 | GAACTTCTGACCTCAAGTGA |
| 7573 | AACTTCTGACCTCAAGTGAT |
| 7574 | ACTTCTGACCTCAAGTGATT |
| 7575 | CTTCTGACCTCAAGTGATTT |
| 7576 | TTCTGACCTCAAGTGATTTG |
| 7577 | TCTGACCTCAAGTGATTTGC |
| 7578 | CTGACCTCAAGTGATTTGCC |
| 7579 | TGACCTCAAGTGATTTGCCC |
| 7580 | GACCTCAAGTGATTTGCCCG |
| 7581 | ACCTCAAGTGATTTGCCCGC |
| 7582 | CCTCAAGTGATTTGCCCGCC |
| 7583 | CTCAAGTGATTTGCCCGCCT |
| 7584 | TCAAGTGATTTGCCCGCCTC |
| 7585 | CAAGTGATTTGCCCGCCTCA |
| 7586 | AAGTGATTTGCCCGCCTCAG |
| 7587 | AGTGATTTGCCCGCCTCAGC |
| 7588 | GTGATTTGCCCGCCTCAGCC |
| 7589 | TGATTTGCCCGCCTCAGCCT |
| 7590 | GATTTGCCCGCCTCAGCCTC |
| 7591 | ATTTGCCCGCCTCAGCCTCC |
| 7592 | TTTGCCCGCCTCAGCCTCCC |
| 7593 | TTGCCCGCCTCAGCCTCCCA |
| 7594 | TGCCCGCCTCAGCCTCCCAA |
| 7595 | GCCCGCCTCAGCCTCCCAAA |
| 7596 | CCCGCCTCAGCCTCCCAAAG |
| 7597 | CCGCCTCAGCCTCCCAAAGT |
| 7598 | CGCCTCAGCCTCCCAAAGTG |
| 7599 | GCCTCAGCCTCCCAAAGTGC |
| 7600 | CCTCAGCCTCCCAAAGTGCT |
| 7601 | CTCAGCCTCCCAAAGTGCTG |
| 7602 | TCAGCCTCCCAAAGTGCTGG |
| 7603 | CAGCCTCCCAAAGTGCTGGC |
| 7604 | AGCCTCCCAAAGTGCTGGCA |
| 7605 | GCCTCCCAAAGTGCTGGCAT |
| 7606 | CCTCCCAAAGTGCTGGCATT |
| 7607 | CTCCCAAAGTGCTGGCATTT |
| 7608 | TCCCAAAGTGCTGGCATTTC |
| 7609 | CCCAAAGTGCTGGCATTTCA |
| 7610 | CCAAAGTGCTGGCATTTCAG |
| 7611 | CAAAGTGCTGGCATTTCAGG |
| 7612 | AAAGTGCTGGCATTTCAGGT |
| 7613 | AAGTGCTGGCATTTCAGGTG |
| 7614 | AGTGCTGGCATTTCAGGTGT |
| 7615 | GTGCTGGCATTTCAGGTGTA |
| 7616 | TGCTGGCATTTCAGGTGTAA |
| 7617 | GCTGGCATTTCAGGTGTAAG |
| 7618 | CTGGCATTTCAGGTGTAAGC |
| 7619 | TGGCATTTCAGGTGTAAGCC |
| 7620 | GGCATTTCAGGTGTAAGCCA |
| 7621 | GCATTTCAGGTGTAAGCCAC |
| 7622 | CATTTCAGGTGTAAGCCACC |
| 7623 | ATTTCAGGTGTAAGCCACCG |
| 7624 | TTTCAGGTGTAAGCCACCGT |
| 7625 | TTCAGGTGTAAGCCACCGTG |
| 7626 | TCAGGTGTAAGCCACCGTGC |
| 7627 | CAGGTGTAAGCCACCGTGCT |
| 7628 | AGGTGTAAGCCACCGTGCTC |
| 7629 | GGTGTAAGCCACCGTGCTCA |
| 7630 | GTGTAAGCCACCGTGCTCAG |
| 7631 | TGTAAGCCACCGTGCTCAGC |
| 7632 | GTAAGCCACCGTGCTCAGCC |
| 7633 | TAAGCCACCGTGCTCAGCCT |
| 7634 | AAGCCACCGTGCTCAGCCTT |
| 7635 | AGCCACCGTGCTCAGCCTTT |
| 7636 | GCCACCGTGCTCAGCCTTTG |
| 7637 | CCACCGTGCTCAGCCTTTGT |
| 7638 | CACCGTGCTCAGCCTTTGTT |
| 7639 | ACCGTGCTCAGCCTTTGTTT |
| 7640 | CCGTGCTCAGCCTTTGTTTT |
| 7641 | CGTGCTCAGCCTTTGTTTTT |
| 7642 | GTGCTCAGCCTTTGTTTTTT |
| 7643 | TGCTCAGCCTTTGTTTTTTT |
| 7644 | GCTCAGCCTTTGTTTTTTTT |
| 7645 | CTCAGCCTTTGTTTTTTTTT |
| 7646 | TCAGCCTTTGTTTTTTTTTA |
| 7647 | CAGCCTTTGTTTTTTTTTAG |
| 7648 | AGCCTTTGTTTTTTTTTAGA |
| 7649 | GCCTTTGTTTTTTTTTAGAA |
| 7650 | CCTTTGTTTTTTTTTAGAAA |
| 7651 | CTTTGTTTTTTTTTAGAAAC |
| 7652 | TTTGTTTTTTTTTAGAAACG |
| 7653 | TTGTTTTTTTTTAGAAACGA |
| 7654 | TGTTTTTTTTTAGAAACGAG |
| 7655 | GTTTTTTTTTAGAAACGAGG |
| 7656 | TTTTTTTTTAGAAACGAGGT |
| 7657 | TTTTTTTTAGAAACGAGGTT |
| 7658 | TTTTTTTAGAAACGAGGTTT |
| 7659 | TTTTTTAGAAACGAGGTTTT |
| 7660 | TTTTTAGAAACGAGGTTTTG |
| 7661 | TTTTAGAAACGAGGTTTTGT |
| 7662 | TTTAGAAACGAGGTTTTGTT |
| 7663 | TTAGAAACGAGGTTTTGTTG |
| 7664 | TAGAAACGAGGTTTTGTTGT |
| 7665 | AGAAACGAGGTTTTGTTGTG |
| 7666 | GAAACGAGGTTTTGTTGTGT |
| 7667 | AAACGAGGTTTTGTTGTGTT |
| 7668 | AACGAGGTTTTGTTGTGTTG |
| 7669 | ACGAGGTTTTGTTGTGTTGC |
| 7670 | CGAGGTTTTGTTGTGTTGCC |
| 7671 | GAGGTTTTGTTGTGTTGCCC |
| 7672 | AGGTTTTGTTGTGTTGCCCA |
| 7673 | GGTTTTGTTGTGTTGCCCAG |
| 7674 | GTTTTGTTGTGTTGCCCAGG |
| 7675 | TTTTGTTGTGTTGCCCAGGT |
| 7676 | TTTGTTGTGTTGCCCAGGTT |
| 7677 | TTGTTGTGTTGCCCAGGTTG |
| 7678 | TGTTGTGTTGCCCAGGTTGG |
| 7679 | GTTGTGTTGCCCAGGTTGGA |
| 7680 | TTGTGTTGCCCAGGTTGGAG |
| 7681 | TGTGTTGCCCAGGTTGGAGT |
| 7682 | GTGTTGCCCAGGTTGGAGTG |
| 7683 | TGTTGCCCAGGTTGGAGTGC |
| 7684 | GTTGCCCAGGTTGGAGTGCG |
| 7685 | TTGCCCAGGTTGGAGTGCGG |
| 7686 | TGCCCAGGTTGGAGTGCGGT |
| 7687 | GCCCAGGTTGGAGTGCGGTG |
| 7688 | CCCAGGTTGGAGTGCGGTGG |
| 7689 | CCAGGTTGGAGTGCGGTGGC |
| 7690 | CAGGTTGGAGTGCGGTGGCT |
| 7691 | AGGTTGGAGTGCGGTGGCTA |
| 7692 | GGTTGGAGTGCGGTGGCTAT |
| 7693 | GTTGGAGTGCGGTGGCTATT |
| 7694 | TTGGAGTGCGGTGGCTATTC |
| 7695 | TGGAGTGCGGTGGCTATTCA |
| 7696 | GGAGTGCGGTGGCTATTCAC |
| 7697 | GAGTGCGGTGGCTATTCACA |
| 7698 | AGTGCGGTGGCTATTCACAG |
| 7699 | GTGCGGTGGCTATTCACAGG |
| 7700 | TGCGGTGGCTATTCACAGGT |
| 7701 | GCGGTGGCTATTCACAGGTG |
| 7702 | CGGTGGCTATTCACAGGTGT |
| 7703 | GGTGGCTATTCACAGGTGTG |
| 7704 | GTGGCTATTCACAGGTGTGA |
| 7705 | TGGCTATTCACAGGTGTGAT |
| 7706 | GGCTATTCACAGGTGTGATC |
| 7707 | GCTATTCACAGGTGTGATCA |
| 7708 | CTATTCACAGGTGTGATCAC |
| 7709 | TATTCACAGGTGTGATCACG |
| 7710 | ATTCACAGGTGTGATCACGG |
| 7711 | TTCACAGGTGTGATCACGGC |
| 7712 | TCACAGGTGTGATCACGGCT |
| 7713 | CACAGGTGTGATCACGGCTC |
| 7714 | ACAGGTGTGATCACGGCTCA |
| 7715 | CAGGTGTGATCACGGCTCAC |
| 7716 | AGGTGTGATCACGGCTCACG |
| 7717 | GGTGTGATCACGGCTCACGG |
| 7718 | GTGTGATCACGGCTCACGGC |
| 7719 | TGTGATCACGGCTCACGGCA |
| 7720 | GTGATCACGGCTCACGGCAG |
| 7721 | TGATCACGGCTCACGGCAGC |
| 7722 | GATCACGGCTCACGGCAGCC |
| 7723 | ATCACGGCTCACGGCAGCCT |
| 7724 | TCACGGCTCACGGCAGCCTT |
| 7725 | CACGGCTCACGGCAGCCTTT |
| 7726 | ACGGCTCACGGCAGCCTTTA |
| 7727 | CGGCTCACGGCAGCCTTTAA |
| 7728 | GGCTCACGGCAGCCTTTAAC |
| 7729 | GCTCACGGCAGCCTTTAACT |
| 7730 | CTCACGGCAGCCTTTAACTC |
| 7731 | TCACGGCAGCCTTTAACTCC |
| 7732 | CACGGCAGCCTTTAACTCCT |
| 7733 | ACGGCAGCCTTTAACTCCTG |
| 7734 | CGGCAGCCTTTAACTCCTGG |
| 7735 | GGCAGCCTTTAACTCCTGGG |
| 7736 | GCAGCCTTTAACTCCTGGGC |
| 7737 | CAGCCTTTAACTCCTGGGCT |
| 7738 | AGCCTTTAACTCCTGGGCTG |
| 7739 | GCCTTTAACTCCTGGGCTGA |
| 7740 | CCTTTAACTCCTGGGCTGAA |
| 7741 | CTTTAACTCCTGGGCTGAAG |
| 7742 | TTTAACTCCTGGGCTGAAGT |
| 7743 | TTAACTCCTGGGCTGAAGTG |
| 7744 | TAACTCCTGGGCTGAAGTGA |
| 7745 | AACTCCTGGGCTGAAGTGAC |
| 7746 | ACTCCTGGGCTGAAGTGACC |
| 7747 | CTCCTGGGCTGAAGTGACCC |
| 7748 | TCCTGGGCTGAAGTGACCCT |
| 7749 | CCTGGGCTGAAGTGACCCTC |
| 7750 | CTGGGCTGAAGTGACCCTCC |
| 7751 | TGGGCTGAAGTGACCCTCCT |
| 7752 | GGGCTGAAGTGACCCTCCTG |
| 7753 | GGCTGAAGTGACCCTCCTGC |
| 7754 | GCTGAAGTGACCCTCCTGCC |
| 7755 | CTGAAGTGACCCTCCTGCCT |
| 7756 | TGAAGTGACCCTCCTGCCTT |
| 7757 | GAAGTGACCCTCCTGCCTTG |
| 7758 | AAGTGACCCTCCTGCCTTGG |
| 7759 | AGTGACCCTCCTGCCTTGGC |
| 7760 | GTGACCCTCCTGCCTTGGCC |
| 7761 | TGACCCTCCTGCCTTGGCCT |
| 7762 | GACCCTCCTGCCTTGGCCTC |
| 7763 | ACCCTCCTGCCTTGGCCTCC |
| 7764 | CCCTCCTGCCTTGGCCTCCC |
| 7765 | CCTCCTGCCTTGGCCTCCCG |
| 7766 | CTCCTGCCTTGGCCTCCCGA |
| 7767 | TCCTGCCTTGGCCTCCCGAG |
| 7768 | CCTGCCTTGGCCTCCCGAGT |
| 7769 | CTGCCTTGGCCTCCCGAGTA |
| 7770 | TGCCTTGGCCTCCCGAGTAG |
| 7771 | GCCTTGGCCTCCCGAGTAGC |
| 7772 | CCTTGGCCTCCCGAGTAGCT |
| 7773 | CTTGGCCTCCCGAGTAGCTG |
| 7774 | TTGGCCTCCCGAGTAGCTGG |
| 7775 | TGGCCTCCCGAGTAGCTGGG |
| 7776 | GGCCTCCCGAGTAGCTGGGA |
| 7777 | GCCTCCCGAGTAGCTGGGAC |
| 7778 | CCTCCCGAGTAGCTGGGACT |
| 7779 | CTCCCGAGTAGCTGGGACTA |
| 7780 | TCCCGAGTAGCTGGGACTAC |
| 7781 | CCCGAGTAGCTGGGACTACA |
| 7782 | CCGAGTAGCTGGGACTACAG |
| 7783 | CGAGTAGCTGGGACTACAGG |
| 7784 | GAGTAGCTGGGACTACAGGC |
| 7785 | AGTAGCTGGGACTACAGGCA |
| 7786 | GTAGCTGGGACTACAGGCAT |
| 7787 | TAGCTGGGACTACAGGCATG |
| 7788 | AGCTGGGACTACAGGCATGT |
| 7789 | GCTGGGACTACAGGCATGTG |
| 7790 | CTGGGACTACAGGCATGTGC |
| 7791 | TGGGACTACAGGCATGTGCC |
| 7792 | GGGACTACAGGCATGTGCCA |
| 7793 | GGACTACAGGCATGTGCCAC |
| 7794 | GACTACAGGCATGTGCCACC |
| 7795 | ACTACAGGCATGTGCCACCA |
| 7796 | CTACAGGCATGTGCCACCAT |
| 7797 | TACAGGCATGTGCCACCATG |
| 7798 | ACAGGCATGTGCCACCATGC |
| 7799 | CAGGCATGTGCCACCATGCC |
| 7800 | AGGCATGTGCCACCATGCCC |
| 7801 | GGCATGTGCCACCATGCCCA |
| 7802 | GCATGTGCCACCATGCCCAG |
| 7803 | CATGTGCCACCATGCCCAGC |
| 7804 | ATGTGCCACCATGCCCAGCA |
| 7805 | TGTGCCACCATGCCCAGCAA |
| 7806 | GTGCCACCATGCCCAGCAAG |
| 7807 | TGCCACCATGCCCAGCAAGG |
| 7808 | GCCACCATGCCCAGCAAGGG |
| 7809 | CCACCATGCCCAGCAAGGGC |
| 7810 | CACCATGCCCAGCAAGGGCT |
| 7811 | ACCATGCCCAGCAAGGGCTG |
| 7812 | CCATGCCCAGCAAGGGCTGA |
| 7813 | CATGCCCAGCAAGGGCTGAA |
| 7814 | ATGCCCAGCAAGGGCTGAAT |
| 7815 | TGCCCAGCAAGGGCTGAATT |
| 7816 | GCCCAGCAAGGGCTGAATTT |
| 7817 | CCCAGCAAGGGCTGAATTTT |
| 7818 | CCAGCAAGGGCTGAATTTTA |
| 7819 | CAGCAAGGGCTGAATTTTAT |
| 7820 | AGCAAGGGCTGAATTTTATT |
| 7821 | GCAAGGGCTGAATTTTATTT |
| 7822 | CAAGGGCTGAATTTTATTTT |
| 7823 | AAGGGCTGAATTTTATTTTA |
| 7824 | AGGGCTGAATTTTATTTTAT |
| 7825 | GGGCTGAATTTTATTTTATT |
| 7826 | GGCTGAATTTTATTTTATTT |
| 7827 | GCTGAATTTTATTTTATTTT |
| 7828 | CTGAATTTTATTTTATTTTA |
| 7829 | TGAATTTTATTTTATTTTAT |
| 7830 | GAATTTTATTTTATTTTATT |
| 7831 | AATTTTATTTTATTTTATTT |
| 7832 | ATTTTATTTTATTTTATTTT |
| 7833 | TTTTATTTTATTTTATTTTA |
| 7834 | TTTATTTTATTTTATTTTAT |
| 7835 | TTATTTTATTTTATTTTATT |
| 7836 | TATTTTATTTTATTTTATTT |
| 7837 | ATTTTATTTTATTTTATTTT |
| 7838 | TTTTATTTTATTTTATTTTC |
| 7839 | TTTATTTTATTTTATTTTCT |
| 7840 | TTATTTTATTTTATTTTCTC |
| 7841 | TATTTTATTTTATTTTCTCT |
| 7842 | ATTTTATTTTATTTTCTCTT |
| 7843 | TTTTATTTTATTTTCTCTTT |
| 7844 | TTTATTTTATTTTCTCTTTT |
| 7845 | TTATTTTATTTTCTCTTTTT |
| 7846 | TATTTTATTTTCTCTTTTTT |
| 7847 | ATTTTATTTTCTCTTTTTTA |
| 7848 | TTTTATTTTCTCTTTTTTAT |
| 7849 | TTTATTTTCTCTTTTTTATT |
| 7850 | TTATTTTCTCTTTTTTATTT |
| 7851 | TATTTTCTCTTTTTTATTTT |
| 7852 | ATTTTCTCTTTTTTATTTTT |
| 7853 | TTTTCTCTTTTTTATTTTTT |
| 7854 | TTTCTCTTTTTTATTTTTTT |
| 7855 | TTCTCTTTTTTATTTTTTTG |
| 7856 | TCTCTTTTTTATTTTTTTGA |
| 7857 | CTCTTTTTTATTTTTTTGAT |
| 7858 | TCTTTTTTATTTTTTTGATG |
| 7859 | CTTTTTTATTTTTTTGATGG |
| 7860 | TTTTTTATTTTTTTGATGGG |
| 7861 | TTTTTATTTTTTTGATGGGG |
| 7862 | TTTTATTTTTTTGATGGGGG |
| 7863 | TTTATTTTTTTGATGGGGGG |
| 7864 | TTATTTTTTTGATGGGGGGA |
| 7865 | TATTTTTTTGATGGGGGGAC |
| 7866 | ATTTTTTTGATGGGGGGACG |
| 7867 | TTTTTTTGATGGGGGGACGG |
| 7868 | TTTTTTGATGGGGGGACGGA |
| 7869 | TTTTTGATGGGGGGACGGAG |
| 7870 | TTTTGATGGGGGGACGGAGT |
| 7871 | TTTGATGGGGGGACGGAGTC |
| 7872 | TTGATGGGGGGACGGAGTCT |
| 7873 | TGATGGGGGGACGGAGTCTC |
| 7874 | GATGGGGGGACGGAGTCTCG |
| 7875 | ATGGGGGGACGGAGTCTCGC |
| 7876 | TGGGGGGACGGAGTCTCGCT |
| 7877 | GGGGGGACGGAGTCTCGCTC |
| 7878 | GGGGGACGGAGTCTCGCTCT |
| 7879 | GGGGACGGAGTCTCGCTCTG |
| 7880 | GGGACGGAGTCTCGCTCTGT |
| 7881 | GGACGGAGTCTCGCTCTGTC |
| 7882 | GACGGAGTCTCGCTCTGTCG |
| 7883 | ACGGAGTCTCGCTCTGTCGC |
| 7884 | CGGAGTCTCGCTCTGTCGCC |
| 7885 | GGAGTCTCGCTCTGTCGCCC |
| 7886 | GAGTCTCGCTCTGTCGCCCA |
| 7887 | AGTCTCGCTCTGTCGCCCAG |
| 7888 | GTCTCGCTCTGTCGCCCAGG |
| 7889 | TCTCGCTCTGTCGCCCAGGC |
| 7890 | CTCGCTCTGTCGCCCAGGCT |
| 7891 | TCGCTCTGTCGCCCAGGCTG |
| 7892 | CGCTCTGTCGCCCAGGCTGG |
| 7893 | GCTCTGTCGCCCAGGCTGGA |
| 7894 | CTCTGTCGCCCAGGCTGGAG |
| 7895 | TCTGTCGCCCAGGCTGGAGT |
| 7896 | CTGTCGCCCAGGCTGGAGTG |
| 7897 | TGTCGCCCAGGCTGGAGTGC |
| 7898 | GTCGCCCAGGCTGGAGTGCG |
| 7899 | TCGCCCAGGCTGGAGTGCGG |
| 7900 | CGCCCAGGCTGGAGTGCGGT |
| 7901 | GCCCAGGCTGGAGTGCGGTG |
| 7902 | CCCAGGCTGGAGTGCGGTGG |
| 7903 | CCAGGCTGGAGTGCGGTGGC |
| 7904 | CAGGCTGGAGTGCGGTGGCG |
| 7905 | AGGCTGGAGTGCGGTGGCGT |
| 7906 | GGCTGGAGTGCGGTGGCGTC |
| 7907 | GCTGGAGTGCGGTGGCGTCA |
| 7908 | CTGGAGTGCGGTGGCGTCAT |
| 7909 | TGGAGTGCGGTGGCGTCATC |
| 7910 | GGAGTGCGGTGGCGTCATCT |
| 7911 | GAGTGCGGTGGCGTCATCTC |
| 7912 | AGTGCGGTGGCGTCATCTCA |
| 7913 | GTGCGGTGGCGTCATCTCAG |
| 7914 | TGCGGTGGCGTCATCTCAGC |
| 7915 | GCGGTGGCGTCATCTCAGCT |
| 7916 | CGGTGGCGTCATCTCAGCTC |
| 7917 | GGTGGCGTCATCTCAGCTCA |
| 7918 | GTGGCGTCATCTCAGCTCAC |
| 7919 | TGGCGTCATCTCAGCTCACT |
| 7920 | GGCGTCATCTCAGCTCACTG |
| 7921 | GCGTCATCTCAGCTCACTGC |
| 7922 | CGTCATCTCAGCTCACTGCA |
| 7923 | GTCATCTCAGCTCACTGCAA |
| 7924 | TCATCTCAGCTCACTGCAAC |
| 7925 | CATCTCAGCTCACTGCAACC |
| 7926 | ATCTCAGCTCACTGCAACCT |
| 7927 | TCTCAGCTCACTGCAACCTC |
| 7928 | CTCAGCTCACTGCAACCTCT |
| 7929 | TCAGCTCACTGCAACCTCTG |
| 7930 | CAGCTCACTGCAACCTCTGC |
| 7931 | AGCTCACTGCAACCTCTGCC |
| 7932 | GCTCACTGCAACCTCTGCCT |
| 7933 | CTCACTGCAACCTCTGCCTC |
| 7934 | TCACTGCAACCTCTGCCTCC |
| 7935 | CACTGCAACCTCTGCCTCCC |
| 7936 | ACTGCAACCTCTGCCTCCCA |
| 7937 | CTGCAACCTCTGCCTCCCAG |
| 7938 | TGCAACCTCTGCCTCCCAGG |
| 7939 | GCAACCTCTGCCTCCCAGGT |
| 7940 | CAACCTCTGCCTCCCAGGTT |
| 7941 | AACCTCTGCCTCCCAGGTTC |
| 7942 | ACCTCTGCCTCCCAGGTTCA |
| 7943 | CCTCTGCCTCCCAGGTTCAA |
| 7944 | CTCTGCCTCCCAGGTTCAAG |
| 7945 | TCTGCCTCCCAGGTTCAAGA |
| 7946 | CTGCCTCCCAGGTTCAAGAG |
| 7947 | TGCCTCCCAGGTTCAAGAGA |
| 7948 | GCCTCCCAGGTTCAAGAGAT |
| 7949 | CCTCCCAGGTTCAAGAGATT |
| 7950 | CTCCCAGGTTCAAGAGATTC |
| 7951 | TCCCAGGTTCAAGAGATTCT |
| 7952 | CCCAGGTTCAAGAGATTCTC |
| 7953 | CCAGGTTCAAGAGATTCTCC |
| 7954 | CAGGTTCAAGAGATTCTCCT |
| 7955 | AGGTTCAAGAGATTCTCCTG |
| 7956 | GGTTCAAGAGATTCTCCTGC |
| 7957 | GTTCAAGAGATTCTCCTGCC |
| 7958 | TTCAAGAGATTCTCCTGCCT |
| 7959 | TCAAGAGATTCTCCTGCCTC |
| 7960 | CAAGAGATTCTCCTGCCTCA |
| 7961 | AAGAGATTCTCCTGCCTCAG |
| 7962 | AGAGATTCTCCTGCCTCAGC |
| 7963 | GAGATTCTCCTGCCTCAGCC |
| 7964 | AGATTCTCCTGCCTCAGCCA |
| 7965 | GATTCTCCTGCCTCAGCCAC |
| 7966 | ATTCTCCTGCCTCAGCCACC |
| 7967 | TTCTCCTGCCTCAGCCACCT |
| 7968 | TCTCCTGCCTCAGCCACCTG |
| 7969 | CTCCTGCCTCAGCCACCTGA |
| 7970 | TCCTGCCTCAGCCACCTGAG |
| 7971 | CCTGCCTCAGCCACCTGAGT |
| 7972 | CTGCCTCAGCCACCTGAGTA |
| 7973 | TGCCTCAGCCACCTGAGTAG |
| 7974 | GCCTCAGCCACCTGAGTAGC |
| 7975 | CCTCAGCCACCTGAGTAGCT |
| 7976 | CTCAGCCACCTGAGTAGCTG |
| 7977 | TCAGCCACCTGAGTAGCTGG |
| 7978 | CAGCCACCTGAGTAGCTGGG |
| 7979 | AGCCACCTGAGTAGCTGGGA |
| 7980 | GCCACCTGAGTAGCTGGGAT |
| 7981 | CCACCTGAGTAGCTGGGATT |
| 7982 | CACCTGAGTAGCTGGGATTA |
| 7983 | ACCTGAGTAGCTGGGATTAC |
| 7984 | CCTGAGTAGCTGGGATTACA |
| 7985 | CTGAGTAGCTGGGATTACAG |
| 7986 | TGAGTAGCTGGGATTACAGG |
| 7987 | GAGTAGCTGGGATTACAGGT |
| 7988 | AGTAGCTGGGATTACAGGTG |
| 7989 | GTAGCTGGGATTACAGGTGC |
| 7990 | TAGCTGGGATTACAGGTGCA |
| 7991 | AGCTGGGATTACAGGTGCAC |
| 7992 | GCTGGGATTACAGGTGCACA |
| 7993 | CTGGGATTACAGGTGCACAC |
| 7994 | TGGGATTACAGGTGCACACC |
| 7995 | GGGATTACAGGTGCACACCA |
| 7996 | GGATTACAGGTGCACACCAC |
| 7997 | GATTACAGGTGCACACCACC |
| 7998 | ATTACAGGTGCACACCACCA |
| 7999 | TTACAGGTGCACACCACCAT |
| 8000 | TACAGGTGCACACCACCATG |
| 8001 | ACAGGTGCACACCACCATGC |
| 8002 | CAGGTGCACACCACCATGCC |
| 8003 | AGGTGCACACCACCATGCCC |
| 8004 | GGTGCACACCACCATGCCCG |
| 8005 | GTGCACACCACCATGCCCGG |
| 8006 | TGCACACCACCATGCCCGGC |
| 8007 | GCACACCACCATGCCCGGCT |
| 8008 | CACACCACCATGCCCGGCTA |
| 8009 | ACACCACCATGCCCGGCTAA |
| 8010 | CACCACCATGCCCGGCTAAT |
| 8011 | ACCACCATGCCCGGCTAATT |
| 8012 | CCACCATGCCCGGCTAATTT |
| 8013 | CACCATGCCCGGCTAATTTT |
| 8014 | ACCATGCCCGGCTAATTTTT |
| 8015 | CCATGCCCGGCTAATTTTTG |
| 8016 | CATGCCCGGCTAATTTTTGT |
| 8017 | ATGCCCGGCTAATTTTTGTA |
| 8018 | TGCCCGGCTAATTTTTGTAT |
| 8019 | GCCCGGCTAATTTTTGTATT |
| 8020 | CCCGGCTAATTTTTGTATTT |
| 8021 | CCGGCTAATTTTTGTATTTT |
| 8022 | CGGCTAATTTTTGTATTTTT |
| 8023 | GGCTAATTTTTGTATTTTTA |
| 8024 | GCTAATTTTTGTATTTTTAG |
| 8025 | CTAATTTTTGTATTTTTAGT |
| 8026 | TAATTTTTGTATTTTTAGTA |
| 8027 | AATTTTTGTATTTTTAGTAG |
| 8028 | ATTTTTGTATTTTTAGTAGA |
| 8029 | TTTTTGTATTTTTAGTAGAG |
| 8030 | TTTTGTATTTTTAGTAGAGA |
| 8031 | TTTGTATTTTTAGTAGAGAC |
| 8032 | TTGTATTTTTAGTAGAGACG |
| 8033 | TGTATTTTTAGTAGAGACGG |
| 8034 | GTATTTTTAGTAGAGACGGG |
| 8035 | TATTTTTAGTAGAGACGGGG |
| 8036 | ATTTTTAGTAGAGACGGGGT |
| 8037 | TTTTTAGTAGAGACGGGGTT |
| 8038 | TTTTAGTAGAGACGGGGTTT |
| 8039 | TTTAGTAGAGACGGGGTTTC |
| 8040 | TTAGTAGAGACGGGGTTTCA |
| 8041 | TAGTAGAGACGGGGTTTCAC |
| 8042 | AGTAGAGACGGGGTTTCACC |
| 8043 | GTAGAGACGGGGTTTCACCA |
| 8044 | TAGAGACGGGGTTTCACCAT |
| 8045 | AGAGACGGGGTTTCACCATG |
| 8046 | GAGACGGGGTTTCACCATGT |
| 8047 | AGACGGGGTTTCACCATGTT |
| 8048 | GACGGGGTTTCACCATGTTG |
| 8049 | ACGGGGTTTCACCATGTTGG |
| 8050 | CGGGGTTTCACCATGTTGGT |
| 8051 | GGGGTTTCACCATGTTGGTC |
| 8052 | GGGTTTCACCATGTTGGTCA |
| 8053 | GGTTTCACCATGTTGGTCAG |
| 8054 | GTTTCACCATGTTGGTCAGG |
| 8055 | TTTCACCATGTTGGTCAGGC |
| 8056 | TTCACCATGTTGGTCAGGCT |
| 8057 | TCACCATGTTGGTCAGGCTG |
| 8058 | CACCATGTTGGTCAGGCTGG |
| 8059 | ACCATGTTGGTCAGGCTGGT |
| 8060 | CCATGTTGGTCAGGCTGGTC |
| 8061 | CATGTTGGTCAGGCTGGTCT |
| 8062 | ATGTTGGTCAGGCTGGTCTC |
| 8063 | TGTTGGTCAGGCTGGTCTCG |
| 8064 | GTTGGTCAGGCTGGTCTCGA |
| 8065 | TTGGTCAGGCTGGTCTCGAA |
| 8066 | TGGTCAGGCTGGTCTCGAAC |
| 8067 | GGTCAGGCTGGTCTCGAACT |
| 8068 | GTCAGGCTGGTCTCGAACTC |
| 8069 | TCAGGCTGGTCTCGAACTCC |
| 8070 | CAGGCTGGTCTCGAACTCCT |
| 8071 | AGGCTGGTCTCGAACTCCTG |
| 8072 | GGCTGGTCTCGAACTCCTGA |
| 8073 | GCTGGTCTCGAACTCCTGAC |
| 8074 | CTGGTCTCGAACTCCTGACC |
| 8075 | TGGTCTCGAACTCCTGACCT |
| 8076 | GGTCTCGAACTCCTGACCTC |
| 8077 | GTCTCGAACTCCTGACCTCG |
| 8078 | TCTCGAACTCCTGACCTCGT |
| 8079 | CTCGAACTCCTGACCTCGTG |
| 8080 | TCGAACTCCTGACCTCGTGA |
| 8081 | CGAACTCCTGACCTCGTGAT |
| 8082 | GAACTCCTGACCTCGTGATC |
| 8083 | AACTCCTGACCTCGTGATCT |
| 8084 | ACTCCTGACCTCGTGATCTG |
| 8085 | CTCCTGACCTCGTGATCTGT |
| 8086 | TCCTGACCTCGTGATCTGTC |
| 8087 | CCTGACCTCGTGATCTGTCT |
| 8088 | CTGACCTCGTGATCTGTCTG |
| 8089 | TGACCTCGTGATCTGTCTGC |
| 8090 | GACCTCGTGATCTGTCTGCC |
| 8091 | ACCTCGTGATCTGTCTGCCT |
| 8092 | CCTCGTGATCTGTCTGCCTC |
| 8093 | CTCGTGATCTGTCTGCCTCA |
| 8094 | TCGTGATCTGTCTGCCTCAA |
| 8095 | CGTGATCTGTCTGCCTCAAC |
| 8096 | GTGATCTGTCTGCCTCAACC |
| 8097 | TGATCTGTCTGCCTCAACCT |
| 8098 | GATCTGTCTGCCTCAACCTC |
| 8099 | ATCTGTCTGCCTCAACCTCC |
| 8100 | TCTGTCTGCCTCAACCTCCC |
| 8101 | CTGTCTGCCTCAACCTCCCA |
| 8102 | TGTCTGCCTCAACCTCCCAA |
| 8103 | GTCTGCCTCAACCTCCCAAA |
| 8104 | TCTGCCTCAACCTCCCAAAG |
| 8105 | CTGCCTCAACCTCCCAAAGT |
| 8106 | TGCCTCAACCTCCCAAAGTG |
| 8107 | GCCTCAACCTCCCAAAGTGC |
| 8108 | CCTCAACCTCCCAAAGTGCT |
| 8109 | CTCAACCTCCCAAAGTGCTG |
| 8110 | TCAACCTCCCAAAGTGCTGG |
| 8111 | CAACCTCCCAAAGTGCTGGG |
| 8112 | AACCTCCCAAAGTGCTGGGA |
| 8113 | ACCTCCCAAAGTGCTGGGAT |
| 8114 | CCTCCCAAAGTGCTGGGATT |
| 8115 | CTCCCAAAGTGCTGGGATTA |
| 8116 | TCCCAAAGTGCTGGGATTAC |
| 8117 | CCCAAAGTGCTGGGATTACA |
| 8118 | CCAAAGTGCTGGGATTACAG |
| 8119 | CAAAGTGCTGGGATTACAGG |
| 8120 | AAAGTGCTGGGATTACAGGT |
| 8121 | AAGTGCTGGGATTACAGGTG |
| 8122 | AGTGCTGGGATTACAGGTGT |
| 8123 | GTGCTGGGATTACAGGTGTG |
| 8124 | TGCTGGGATTACAGGTGTGA |
| 8125 | GCTGGGATTACAGGTGTGAG |
| 8126 | CTGGGATTACAGGTGTGAGC |
| 8127 | TGGGATTACAGGTGTGAGCC |
| 8128 | GGGATTACAGGTGTGAGCCA |
| 8129 | GGATTACAGGTGTGAGCCAC |
| 8130 | GATTACAGGTGTGAGCCACT |
| 8131 | ATTACAGGTGTGAGCCACTG |
| 8132 | TTACAGGTGTGAGCCACTGC |
| 8133 | TACAGGTGTGAGCCACTGCA |
| 8134 | ACAGGTGTGAGCCACTGCAC |
| 8135 | CAGGTGTGAGCCACTGCACT |
| 8136 | AGGTGTGAGCCACTGCACTT |
| 8137 | GGTGTGAGCCACTGCACTTG |
| 8138 | GTGTGAGCCACTGCACTTGG |
| 8139 | TGTGAGCCACTGCACTTGGC |
| 8140 | GTGAGCCACTGCACTTGGCC |
| 8141 | TGAGCCACTGCACTTGGCCT |
| 8142 | GAGCCACTGCACTTGGCCTT |
| 8143 | AGCCACTGCACTTGGCCTTT |
| 8144 | GCCACTGCACTTGGCCTTTT |
| 8145 | CCACTGCACTTGGCCTTTTT |
| 8146 | CACTGCACTTGGCCTTTTTT |
| 8147 | ACTGCACTTGGCCTTTTTTT |
| 8148 | CTGCACTTGGCCTTTTTTTT |
| 8149 | TGCACTTGGCCTTTTTTTTT |
| 8150 | GCACTTGGCCTTTTTTTTTA |
| 8151 | CACTTGGCCTTTTTTTTTAC |
| 8152 | ACTTGGCCTTTTTTTTTACT |
| 8153 | CTTGGCCTTTTTTTTTACTT |
| 8154 | TTGGCCTTTTTTTTTACTTT |
| 8155 | TGGCCTTTTTTTTTACTTTT |
| 8156 | GGCCTTTTTTTTTACTTTTA |
| 8157 | GCCTTTTTTTTTACTTTTAC |
| 8158 | CCTTTTTTTTTACTTTTACA |
| 8159 | CTTTTTTTTTACTTTTACAA |
| 8160 | TTTTTTTTTACTTTTACAAA |
| 8161 | TTTTTTTTACTTTTACAAAA |
| 8162 | TTTTTTTACTTTTACAAAAT |
| 8163 | TTTTTTACTTTTACAAAATT |
| 8164 | TTTTTACTTTTACAAAATTT |
| 8165 | TTTTACTTTTACAAAATTTT |
| 8166 | TTTACTTTTACAAAATTTTT |
| 8167 | TTACTTTTACAAAATTTTTT |
| 8168 | TACTTTTACAAAATTTTTTG |
| 8169 | ACTTTTACAAAATTTTTTGT |
| 8170 | CTTTTACAAAATTTTTTGTA |
| 8171 | TTTTACAAAATTTTTTGTAA |
| 8172 | TTTACAAAATTTTTTGTAAA |
| 8173 | TTACAAAATTTTTTGTAAAG |
| 8174 | TACAAAATTTTTTGTAAAGA |
| 8175 | ACAAAATTTTTTGTAAAGAT |
| 8176 | CAAAATTTTTTGTAAAGATG |
| 8177 | AAAATTTTTTGTAAAGATGA |
| 8178 | AAATTTTTTGTAAAGATGAG |
| 8179 | AATTTTTTGTAAAGATGAGC |
| 8180 | ATTTTTTGTAAAGATGAGCT |
| 8181 | TTTTTTGTAAAGATGAGCTC |
| 8182 | TTTTTGTAAAGATGAGCTCT |
| 8183 | TTTTGTAAAGATGAGCTCTC |
| 8184 | TTTGTAAAGATGAGCTCTCA |
| 8185 | TTGTAAAGATGAGCTCTCAC |
| 8186 | TGTAAAGATGAGCTCTCACT |
| 8187 | GTAAAGATGAGCTCTCACTA |
| 8188 | TAAAGATGAGCTCTCACTAT |
| 8189 | AAAGATGAGCTCTCACTATG |
| 8190 | AAGATGAGCTCTCACTATGT |
| 8191 | AGATGAGCTCTCACTATGTT |
| 8192 | GATGAGCTCTCACTATGTTG |
| 8193 | ATGAGCTCTCACTATGTTGT |
| 8194 | TGAGCTCTCACTATGTTGTC |
| 8195 | GAGCTCTCACTATGTTGTCC |
| 8196 | AGCTCTCACTATGTTGTCCA |
| 8197 | GCTCTCACTATGTTGTCCAG |
| 8198 | CTCTCACTATGTTGTCCAGG |
| 8199 | TCTCACTATGTTGTCCAGGC |
| 8200 | CTCACTATGTTGTCCAGGCT |
| 8201 | TCACTATGTTGTCCAGGCTG |
| 8202 | CACTATGTTGTCCAGGCTGG |
| 8203 | ACTATGTTGTCCAGGCTGGT |
| 8204 | CTATGTTGTCCAGGCTGGTC |
| 8205 | TATGTTGTCCAGGCTGGTCT |
| 8206 | ATGTTGTCCAGGCTGGTCTC |
| 8207 | TGTTGTCCAGGCTGGTCTCG |
| 8208 | GTTGTCCAGGCTGGTCTCGA |
| 8209 | TTGTCCAGGCTGGTCTCGAA |
| 8210 | TGTCCAGGCTGGTCTCGAAC |
| 8211 | GTCCAGGCTGGTCTCGAACT |
| 8212 | TCCAGGCTGGTCTCGAACTT |
| 8213 | CCAGGCTGGTCTCGAACTTC |
| 8214 | CAGGCTGGTCTCGAACTTCT |
| 8215 | AGGCTGGTCTCGAACTTCTG |
| 8216 | GGCTGGTCTCGAACTTCTGG |
| 8217 | GCTGGTCTCGAACTTCTGGG |
| 8218 | CTGGTCTCGAACTTCTGGGC |
| 8219 | TGGTCTCGAACTTCTGGGCT |
| 8220 | GGTCTCGAACTTCTGGGCTC |
| 8221 | GTCTCGAACTTCTGGGCTCA |
| 8222 | TCTCGAACTTCTGGGCTCAA |
| 8223 | CTCGAACTTCTGGGCTCAAG |
| 8224 | TCGAACTTCTGGGCTCAAGT |
| 8225 | CGAACTTCTGGGCTCAAGTG |
| 8226 | GAACTTCTGGGCTCAAGTGA |
| 8227 | AACTTCTGGGCTCAAGTGAT |
| 8228 | ACTTCTGGGCTCAAGTGATC |
| 8229 | CTTCTGGGCTCAAGTGATCC |
| 8230 | TTCTGGGCTCAAGTGATCCT |
| 8231 | TCTGGGCTCAAGTGATCCTC |
| 8232 | CTGGGCTCAAGTGATCCTCA |
| 8233 | TGGGCTCAAGTGATCCTCAT |
| 8234 | GGGCTCAAGTGATCCTCATG |
| 8235 | GGCTCAAGTGATCCTCATGA |
| 8236 | GCTCAAGTGATCCTCATGAT |
| 8237 | CTCAAGTGATCCTCATGATA |
| 8238 | TCAAGTGATCCTCATGATAG |
| 8239 | CAAGTGATCCTCATGATAGG |
| 8240 | AAGTGATCCTCATGATAGGC |
| 8241 | AGTGATCCTCATGATAGGCC |
| 8242 | GTGATCCTCATGATAGGCCT |
| 8243 | TGATCCTCATGATAGGCCTC |
| 8244 | GATCCTCATGATAGGCCTCC |
| 8245 | ATCCTCATGATAGGCCTCCC |
| 8246 | TCCTCATGATAGGCCTCCCA |
| 8247 | CCTCATGATAGGCCTCCCAA |
| 8248 | CTCATGATAGGCCTCCCAAA |
| 8249 | TCATGATAGGCCTCCCAAAG |
| 8250 | CATGATAGGCCTCCCAAAGT |
| 8251 | ATGATAGGCCTCCCAAAGTG |
| 8252 | TGATAGGCCTCCCAAAGTGT |
| 8253 | GATAGGCCTCCCAAAGTGTC |
| 8254 | ATAGGCCTCCCAAAGTGTCG |
| 8255 | TAGGCCTCCCAAAGTGTCGG |
| 8256 | AGGCCTCCCAAAGTGTCGGG |
| 8257 | GGCCTCCCAAAGTGTCGGGA |
| 8258 | GCCTCCCAAAGTGTCGGGAT |
| 8259 | CCTCCCAAAGTGTCGGGATT |
| 8260 | CTCCCAAAGTGTCGGGATTA |
| 8261 | TCCCAAAGTGTCGGGATTAC |
| 8262 | CCCAAAGTGTCGGGATTACA |
| 8263 | CCAAAGTGTCGGGATTACAG |
| 8264 | CAAAGTGTCGGGATTACAGA |
| 8265 | AAAGTGTCGGGATTACAGAT |
| 8266 | AAGTGTCGGGATTACAGATA |
| 8267 | AGTGTCGGGATTACAGATAT |
| 8268 | GTGTCGGGATTACAGATATG |
| 8269 | TGTCGGGATTACAGATATGA |
| 8270 | GTCGGGATTACAGATATGAG |
| 8271 | TCGGGATTACAGATATGAGC |
| 8272 | CGGGATTACAGATATGAGCC |
| 8273 | GGGATTACAGATATGAGCCA |
| 8274 | GGATTACAGATATGAGCCAC |
| 8275 | GATTACAGATATGAGCCACT |
| 8276 | ATTACAGATATGAGCCACTA |
| 8277 | TTACAGATATGAGCCACTAC |
| 8278 | TACAGATATGAGCCACTACA |
| 8279 | ACAGATATGAGCCACTACAC |
| 8280 | CAGATATGAGCCACTACACC |
| 8281 | AGATATGAGCCACTACACCC |
| 8282 | GATATGAGCCACTACACCCA |
| 8283 | ATATGAGCCACTACACCCAG |
| 8284 | TATGAGCCACTACACCCAGA |
| 8285 | ATGAGCCACTACACCCAGAC |
| 8286 | TGAGCCACTACACCCAGACA |
| 8287 | GAGCCACTACACCCAGACAA |
| 8288 | AGCCACTACACCCAGACAAG |
| 8289 | GCCACTACACCCAGACAAGG |
| 8290 | CCACTACACCCAGACAAGGG |
| 8291 | CACTACACCCAGACAAGGGC |
| 8292 | ACTACACCCAGACAAGGGCT |
| 8293 | CTACACCCAGACAAGGGCTG |
| 8294 | TACACCCAGACAAGGGCTGC |
| 8295 | ACACCCAGACAAGGGCTGCA |
| 8296 | CACCCAGACAAGGGCTGCAT |
| 8297 | ACCCAGACAAGGGCTGCATT |
| 8298 | CCCAGACAAGGGCTGCATTT |
| 8299 | CCAGACAAGGGCTGCATTTT |
| 8300 | CAGACAAGGGCTGCATTTTA |
| 8301 | AGACAAGGGCTGCATTTTAA |
| 8302 | GACAAGGGCTGCATTTTAAA |
| 8303 | ACAAGGGCTGCATTTTAAAG |
| 8304 | CAAGGGCTGCATTTTAAAGA |
| 8305 | AAGGGCTGCATTTTAAAGAA |
| 8306 | AGGGCTGCATTTTAAAGAAA |
| 8307 | GGGCTGCATTTTAAAGAAAA |
| 8308 | GGCTGCATTTTAAAGAAAAG |
| 8309 | GCTGCATTTTAAAGAAAAGA |
| 8310 | CTGCATTTTAAAGAAAAGAG |
| 8311 | TGCATTTTAAAGAAAAGAGG |
| 83 12 | GCATTTTAAAGAAAAGAGGC |
| 8313 | CATTTTAAAGAAAAGAGGCC |
| 83 14 | ATTTTAAAGAAAAGAGGCCA |
| 83 15 | TTTTAAAGAAAAGAGGCCAG |
| 83 16 | TTTAAAGAAAAGAGGCCAGG |
| 8317 | TTAAAGAAAAGAGGCCAGGA |
| 83 18 | TAAAGAAAAGAGGCCAGGAG |
| 83 19 | AAAGAAAAGAGGCCAGGAGC |
| 8320 | AAGAAAAGAGGCCAGGAGCA |
| 8321 | AGAAAAGAGGCCAGGAGCAG |
| 8322 | GAAAAGAGGCCAGGAGCAGT |
| 8323 | AAAAGAGGCCAGGAGCAGTG |
| 8324 | AAAGAGGCCAGGAGCAGTGG |
| 8325 | AAGAGGCCAGGAGCAGTGGC |
| 8326 | AGAGGCCAGGAGCAGTGGCT |
| 8327 | GAGGCCAGGAGCAGTGGCTA |
| 8328 | AGGCCAGGAGCAGTGGCTAA |
| 8329 | GGCCAGGAGCAGTGGCTAAT |
| 8330 | GCCAGGAGCAGTGGCTAATG |
| 8331 | CCAGGAGCAGTGGCTAATGC |
| 8332 | CAGGAGCAGTGGCTAATGCC |
| 8333 | AGGAGCAGTGGCTAATGCCT |
| 8334 | GGAGCAGTGGCTAATGCCTA |
| 8335 | GAGCAGTGGCTAATGCCTAT |
| 8336 | AGCAGTGGCTAATGCCTATA |
| 8337 | GCAGTGGCTAATGCCTATAA |
| 8338 | CAGTGGCTAATGCCTATAAT |
| 8339 | AGTGGCTAATGCCTATAATC |
| 8340 | GTGGCTAATGCCTATAATCC |
| 8341 | TGGCTAATGCCTATAATCCC |
| 8342 | GGCTAATGCCTATAATCCCA |
| 8343 | GCTAATGCCTATAATCCCAG |
| 8344 | CTAATGCCTATAATCCCAGC |
| 8345 | TAATGCCTATAATCCCAGCA |
| 8346 | AATGCCTATAATCCCAGCAT |
| 8347 | ATGCCTATAATCCCAGCATT |
| 8348 | TGCCTATAATCCCAGCATTT |
| 8349 | GCCTATAATCCCAGCATTTT |
| 8350 | CCTATAATCCCAGCATTTTG |
| 8351 | CTATAATCCCAGCATTTTGG |
| 8352 | TATAATCCCAGCATTTTGGG |
| 8353 | ATAATCCCAGCATTTTGGGA |
| 8354 | TAATCCCAGCATTTTGGGAG |
| 8355 | AATCCCAGCATTTTGGGAGG |
| 8356 | ATCCCAGCATTTTGGGAGGC |
| 8357 | TCCCAGCATTTTGGGAGGCC |
| 8358 | CCCAGCATTTTGGGAGGCCA |
| 8359 | CCAGCATTTTGGGAGGCCAA |
| 8360 | CAGCATTTTGGGAGGCCAAA |
| 8361 | AGCATTTTGGGAGGCCAAAG |
| 8362 | GCATTTTGGGAGGCCAAAGT |
| 8363 | CATTTTGGGAGGCCAAAGTC |
| 8364 | ATTTTGGGAGGCCAAAGTCG |
| 8365 | TTTTGGGAGGCCAAAGTCGG |
| 8366 | TTTGGGAGGCCAAAGTCGGC |
| 8367 | TTGGGAGGCCAAAGTCGGCA |
| 8368 | TGGGAGGCCAAAGTCGGCAA |
| 8369 | GGGAGGCCAAAGTCGGCAAA |
| 8370 | GGAGGCCAAAGTCGGCAAAT |
| 8371 | GAGGCCAAAGTCGGCAAATC |
| 8372 | AGGCCAAAGTCGGCAAATCA |
| 8373 | GGCCAAAGTCGGCAAATCAT |
| 8374 | GCCAAAGTCGGCAAATCATT |
| 8375 | CCAAAGTCGGCAAATCATTT |
| 8376 | CAAAGTCGGCAAATCATTTG |
| 8377 | AAAGTCGGCAAATCATTTGA |
| 8378 | AAGTCGGCAAATCATTTGAG |
| 8379 | AGTCGGCAAATCATTTGAGG |
| 8380 | GTCGGCAAATCATTTGAGGT |
| 8381 | TCGGCAAATCATTTGAGGTC |
| 8382 | CGGCAAATCATTTGAGGTCA |
| 8383 | GGCAAATCATTTGAGGTCAG |
| 8384 | GCAAATCATTTGAGGTCAGG |
| 8385 | CAAATCATTTGAGGTCAGGA |
| 8386 | AAATCATTTGAGGTCAGGAG |
| 8387 | AATCATTTGAGGTCAGGAGT |
| 8388 | ATCATTTGAGGTCAGGAGTT |
| 8389 | TCATTTGAGGTCAGGAGTTT |
| 8390 | CATTTGAGGTCAGGAGTTTG |
| 8391 | ATTTGAGGTCAGGAGTTTGA |
| 8392 | TTTGAGGTCAGGAGTTTGAG |
| 8393 | TTGAGGTCAGGAGTTTGAGA |
| 8394 | TGAGGTCAGGAGTTTGAGAC |
| 8395 | GAGGTCAGGAGTTTGAGACC |
| 8396 | AGGTCAGGAGTTTGAGACCA |
| 8397 | GGTCAGGAGTTTGAGACCAG |
| 8398 | GTCAGGAGTTTGAGACCAGC |
| 8399 | TCAGGAGTTTGAGACCAGCC |
| 8400 | CAGGAGTTTGAGACCAGCCA |
| 8401 | AGGAGTTTGAGACCAGCCAG |
| 8402 | GGAGTTTGAGACCAGCCAGA |
| 8403 | GAGTTTGAGACCAGCCAGAC |
| 8404 | AGTTTGAGACCAGCCAGACC |
| 8405 | GTTTGAGACCAGCCAGACCA |
| 8406 | TTTGAGACCAGCCAGACCAA |
| 8407 | TTGAGACCAGCCAGACCAAC |
| 8408 | TGAGACCAGCCAGACCAACA |
| 8409 | GAGACCAGCCAGACCAACAT |
| 8410 | AGACCAGCCAGACCAACATG |
| 8411 | GACCAGCCAGACCAACATGG |
| 8412 | ACCAGCCAGACCAACATGGT |
| 8413 | CCAGCCAGACCAACATGGTG |
| 8414 | CAGCCAGACCAACATGGTGA |
| 8415 | AGCCAGACCAACATGGTGAA |
| 8416 | GCCAGACCAACATGGTGAAA |
| 8417 | CCAGACCAACATGGTGAAAC |
| 8418 | CAGACCAACATGGTGAAACC |
| 8419 | AGACCAACATGGTGAAACCC |
| 8420 | GACCAACATGGTGAAACCCA |
| 8421 | ACCAACATGGTGAAACCCAG |
| 8422 | CCAACATGGTGAAACCCAGT |
| 8423 | CAACATGGTGAAACCCAGTC |
| 8424 | AACATGGTGAAACCCAGTCT |
| 8425 | ACATGGTGAAACCCAGTCTC |
| 8426 | CATGGTGAAACCCAGTCTCT |
| 8427 | ATGGTGAAACCCAGTCTCTA |
| 8428 | TGGTGAAACCCAGTCTCTAC |
| 8429 | GGTGAAACCCAGTCTCTACT |
| 8430 | GTGAAACCCAGTCTCTACTA |
| 8431 | TGAAACCCAGTCTCTACTAA |
| 8432 | GAAACCCAGTCTCTACTAAA |
| 8433 | AAACCCAGTCTCTACTAAAA |
| 8434 | AACCCAGTCTCTACTAAAAA |
| 8435 | ACCCAGTCTCTACTAAAAAT |
| 8436 | CCCAGTCTCTACTAAAAATA |
| 8437 | CCAGTCTCTACTAAAAATAC |
| 8438 | CAGTCTCTACTAAAAATACA |
| 8439 | AGTCTCTACTAAAAATACAA |
| 8440 | GTCTCTACTAAAAATACAAA |
| 8441 | TCTCTACTAAAAATACAAAA |
| 8442 | CTCTACTAAAAATACAAAAA |
| 8443 | TCTACTAAAAATACAAAAAT |
| 8444 | CTACTAAAAATACAAAAATT |
| 8445 | TACTAAAAATACAAAAATTA |
| 8446 | ACTAAAAATACAAAAATTAG |
| 8447 | CTAAAAATACAAAAATTAGC |
| 8448 | TAAAAATACAAAAATTAGCT |
| 8449 | AAAAATACAAAAATTAGCTG |
| 8450 | AAAATACAAAAATTAGCTGG |
| 8451 | AAATACAAAAATTAGCTGGG |
| 8452 | AATACAAAAATTAGCTGGGT |
| 8453 | ATACAAAAATTAGCTGGGTG |
| 8454 | TACAAAAATTAGCTGGGTGT |
| 8455 | ACAAAAATTAGCTGGGTGTG |
| 8456 | CAAAAATTAGCTGGGTGTGG |
| 8457 | AAAAATTAGCTGGGTGTGGT |
| 8458 | AAAATTAGCTGGGTGTGGTT |
| 8459 | AAATTAGCTGGGTGTGGTTG |
| 8460 | AATTAGCTGGGTGTGGTTGC |
| 8461 | ATTAGCTGGGTGTGGTTGCT |
| 8462 | TTAGCTGGGTGTGGTTGCTC |
| 8463 | TAGCTGGGTGTGGTTGCTCG |
| 8464 | AGCTGGGTGTGGTTGCTCGC |
| 8465 | GCTGGGTGTGGTTGCTCGCA |
| 8466 | CTGGGTGTGGTTGCTCGCAC |
| 8467 | TGGGTGTGGTTGCTCGCACC |
| 8468 | GGGTGTGGTTGCTCGCACCT |
| 8469 | GGTGTGGTTGCTCGCACCTG |
| 8470 | GTGTGGTTGCTCGCACCTGT |
| 8471 | TGTGGTTGCTCGCACCTGTA |
| 8472 | GTGGTTGCTCGCACCTGTAG |
| 8473 | TGGTTGCTCGCACCTGTAGT |
| 8474 | GGTTGCTCGCACCTGTAGTC |
| 8475 | GTTGCTCGCACCTGTAGTCT |
| 8476 | TTGCTCGCACCTGTAGTCTC |
| 8477 | TGCTCGCACCTGTAGTCTCA |
| 8478 | GCTCGCACCTGTAGTCTCAG |
| 8479 | CTCGCACCTGTAGTCTCAGC |
| 8480 | TCGCACCTGTAGTCTCAGCT |
| 8481 | CGCACCTGTAGTCTCAGCTA |
| 8482 | GCACCTGTAGTCTCAGCTAC |
| 8483 | CACCTGTAGTCTCAGCTACT |
| 8484 | ACCTGTAGTCTCAGCTACTG |
| 8485 | CCTGTAGTCTCAGCTACTGG |
| 8486 | CTGTAGTCTCAGCTACTGGG |
| 8487 | TGTAGTCTCAGCTACTGGGG |
| 8488 | GTAGTCTCAGCTACTGGGGA |
| 8489 | TAGTCTCAGCTACTGGGGAG |
| 8490 | AGTCTCAGCTACTGGGGAGG |
| 8491 | GTCTCAGCTACTGGGGAGGC |
| 8492 | TCTCAGCTACTGGGGAGGCT |
| 8493 | CTCAGCTACTGGGGAGGCTG |
| 8494 | TCAGCTACTGGGGAGGCTGA |
| 8495 | CAGCTACTGGGGAGGCTGAC |
| 8496 | AGCTACTGGGGAGGCTGACG |
| 8497 | GCTACTGGGGAGGCTGACGC |
| 8498 | CTACTGGGGAGGCTGACGCT |
| 8499 | TACTGGGGAGGCTGACGCTG |
| 8500 | ACTGGGGAGGCTGACGCTGG |
| 8501 | CTGGGGAGGCTGACGCTGGA |
| 8502 | TGGGGAGGCTGACGCTGGAG |
| 8503 | GGGGAGGCTGACGCTGGAGA |
| 8504 | GGGAGGCTGACGCTGGAGAA |
| 8505 | GGAGGCTGACGCTGGAGAAT |
| 8506 | GAGGCTGACGCTGGAGAATT |
| 8507 | AGGCTGACGCTGGAGAATTG |
| 8508 | GGCTGACGCTGGAGAATTGC |
| 8509 | GCTGACGCTGGAGAATTGCT |
| 8510 | CTGACGCTGGAGAATTGCTT |
| 8511 | TGACGCTGGAGAATTGCTTG |
| 8512 | GACGCTGGAGAATTGCTTGA |
| 8513 | ACGCTGGAGAATTGCTTGAA |
| 8514 | CGCTGGAGAATTGCTTGAAC |
| 8515 | GCTGGAGAATTGCTTGAACC |
| 8516 | CTGGAGAATTGCTTGAACCC |
| 8517 | TGGAGAATTGCTTGAACCCG |
| 8518 | GGAGAATTGCTTGAACCCGG |
| 8519 | GAGAATTGCTTGAACCCGGG |
| 8520 | AGAATTGCTTGAACCCGGGA |
| 8521 | GAATTGCTTGAACCCGGGAG |
| 8522 | AATTGCTTGAACCCGGGAGG |
| 8523 | ATTGCTTGAACCCGGGAGGC |
| 8524 | TTGCTTGAACCCGGGAGGCG |
| 8525 | TGCTTGAACCCGGGAGGCGG |
| 8526 | GCTTGAACCCGGGAGGCGGA |
| 8527 | CTTGAACCCGGGAGGCGGAG |
| 8528 | TTGAACCCGGGAGGCGGAGG |
| 8529 | TGAACCCGGGAGGCGGAGGT |
| 8530 | GAACCCGGGAGGCGGAGGTT |
| 8531 | AACCCGGGAGGCGGAGGTTT |
| 8532 | ACCCGGGAGGCGGAGGTTTC |
| 8533 | CCCGGGAGGCGGAGGTTTCA |
| 8534 | CCGGGAGGCGGAGGTTTCAG |
| 8535 | CGGGAGGCGGAGGTTTCAGT |
| 8536 | GGGAGGCGGAGGTTTCAGTG |
| 8537 | GGAGGCGGAGGTTTCAGTGA |
| 8538 | GAGGCGGAGGTTTCAGTGAG |
| 8539 | AGGCGGAGGTTTCAGTGAGC |
| 8540 | GGCGGAGGTTTCAGTGAGCT |
| 8541 | GCGGAGGTTTCAGTGAGCTG |
| 8542 | CGGAGGTTTCAGTGAGCTGA |
| 8543 | GGAGGTTTCAGTGAGCTGAG |
| 8544 | GAGGTTTCAGTGAGCTGAGA |
| 8545 | AGGTTTCAGTGAGCTGAGAT |
| 8546 | GGTTTCAGTGAGCTGAGATC |
| 8547 | GTTTCAGTGAGCTGAGATCG |
| 8548 | TTTCAGTGAGCTGAGATCGT |
| 8549 | TTCAGTGAGCTGAGATCGTG |
| 8550 | TCAGTGAGCTGAGATCGTGG |
| 8551 | CAGTGAGCTGAGATCGTGGC |
| 8552 | AGTGAGCTGAGATCGTGGCA |
| 8553 | GTGAGCTGAGATCGTGGCAT |
| 8554 | TGAGCTGAGATCGTGGCATT |
| 8555 | GAGCTGAGATCGTGGCATTG |
| 8556 | AGCTGAGATCGTGGCATTGC |
| 8557 | GCTGAGATCGTGGCATTGCA |
| 8558 | CTGAGATCGTGGCATTGCAC |
| 8559 | TGAGATCGTGGCATTGCACT |
| 8560 | GAGATCGTGGCATTGCACTC |
| 8561 | AGATCGTGGCATTGCACTCC |
| 8562 | GATCGTGGCATTGCACTCCA |
| 8563 | ATCGTGGCATTGCACTCCAG |
| 8564 | TCGTGGCATTGCACTCCAGC |
| 8565 | CGTGGCATTGCACTCCAGCT |
| 8566 | GTGGCATTGCACTCCAGCTC |
| 8567 | TGGCATTGCACTCCAGCTCC |
| 8568 | GGCATTGCACTCCAGCTCCA |
| 8569 | GCATTGCACTCCAGCTCCAA |
| 8570 | CATTGCACTCCAGCTCCAAG |
| 8571 | ATTGCACTCCAGCTCCAAGA |
| 8572 | TTGCACTCCAGCTCCAAGAG |
| 8573 | TGCACTCCAGCTCCAAGAGC |
| 8574 | GCACTCCAGCTCCAAGAGCA |
| 8575 | CACTCCAGCTCCAAGAGCAA |
| 8576 | ACTCCAGCTCCAAGAGCAAA |
| 8577 | CTCCAGCTCCAAGAGCAAAA |
| 8578 | TCCAGCTCCAAGAGCAAAAC |
| 8579 | CCAGCTCCAAGAGCAAAACT |
| 8580 | CAGCTCCAAGAGCAAAACTC |
| 8581 | AGCTCCAAGAGCAAAACTCC |
| 8582 | GCTCCAAGAGCAAAACTCCA |
| 8583 | CTCCAAGAGCAAAACTCCAT |
| 8584 | TCCAAGAGCAAAACTCCATC |
| 8585 | CCAAGAGCAAAACTCCATCT |
| 8586 | CAAGAGCAAAACTCCATCTC |
| 8587 | AAGAGCAAAACTCCATCTCA |
| 8588 | AGAGCAAAACTCCATCTCAA |
| 8589 | GAGCAAAACTCCATCTCAAA |
| 8590 | AGCAAAACTCCATCTCAAAA |
| 8591 | GCAAAACTCCATCTCAAAAA |
| 8592 | CAAAACTCCATCTCAAAAAA |
| 8593 | AAAACTCCATCTCAAAAAAA |
| 8594 | AAACTCCATCTCAAAAAAAA |
| 8595 | AACTCCATCTCAAAAAAAAA |
| 8596 | ACTCCATCTCAAAAAAAAAA |
| 8597 | CTCCATCTCAAAAAAAAAAA |
| 8598 | TCCATCTCAAAAAAAAAAAA |
| 8599 | CCATCTCAAAAAAAAAAAAA |
| 8600 | CATCTCAAAAAAAAAAAAAA |
| 8601 | ATCTCAAAAAAAAAAAAAAA |
| 8602 | TCTCAAAAAAAAAAAAAAAA |
| 8603 | CTCAAAAAAAAAAAAAAAAA |
| 8604 | TCAAAAAAAAAAAAAAAAAA |
| 8605 | CAAAAAAAAAAAAAAAAAAA |
| 8606 | AAAAAAAAAAAAAAAAAAAA |
| 8607 | AAAAAAAAAAAAAAAAAAAA |
| 8608 | AAAAAAAAAAAAAAAAAAAG |
| 8609 | AAAAAAAAAAAAAAAAAAGA |
| 8610 | AAAAAAAAAAAAAAAAAGAC |
| 8611 | AAAAAAAAAAAAAAAAGACC |
| 8612 | AAAAAAAAAAAAAAAGACCA |
| 8613 | AAAAAAAAAAAAAAGACCAG |
| 8614 | AAAAAAAAAAAAAGACCAGC |
| 8615 | AAAAAAAAAAAAGACCAGCT |
| 8616 | AAAAAAAAAAAGACCAGCTT |
| 8617 | AAAAAAAAAAGACCAGCTTG |
| 8618 | AAAAAAAAAGACCAGCTTGG |
| 8619 | AAAAAAAAGACCAGCTTGGG |
| 8620 | AAAAAAAGACCAGCTTGGGC |
| 8621 | AAAAAAGACCAGCTTGGGCA |
| 8622 | AAAAAGACCAGCTTGGGCAA |
| 8623 | AAAAGACCAGCTTGGGCAAC |
| 8624 | AAAGACCAGCTTGGGCAACA |
| 8625 | AAGACCAGCTTGGGCAACAT |
| 8626 | AGACCAGCTTGGGCAACATA |
| 8627 | GACCAGCTTGGGCAACATAG |
| 8628 | ACCAGCTTGGGCAACATAGC |
| 8629 | CCAGCTTGGGCAACATAGCA |
| 8630 | CAGCTTGGGCAACATAGCAA |
| 8631 | AGCTTGGGCAACATAGCAAG |
| 8632 | GCTTGGGCAACATAGCAAGA |
| 8633 | CTTGGGCAACATAGCAAGAC |
| 8634 | TTGGGCAACATAGCAAGACC |
| 8635 | TGGGCAACATAGCAAGACCC |
| 8636 | GGGCAACATAGCAAGACCCT |
| 8637 | GGCAACATAGCAAGACCCTG |
| 8638 | GCAACATAGCAAGACCCTGC |
| 8639 | CAACATAGCAAGACCCTGCC |
| 8640 | AACATAGCAAGACCCTGCCT |
| 8641 | ACATAGCAAGACCCTGCCTT |
| 8642 | CATAGCAAGACCCTGCCTTT |
| 8643 | ATAGCAAGACCCTGCCTTTA |
| 8644 | TAGCAAGACCCTGCCTTTAA |
| 8645 | AGCAAGACCCTGCCTTTAAT |
| 8646 | GCAAGACCCTGCCTTTAATT |
| 8647 | CAAGACCCTGCCTTTAATTT |
| 8648 | AAGACCCTGCCTTTAATTTT |
| 8649 | AGACCCTGCCTTTAATTTTT |
| 8650 | GACCCTGCCTTTAATTTTTT |
| 8651 | ACCCTGCCTTTAATTTTTTT |
| 8652 | CCCTGCCTTTAATTTTTTTG |
| 8653 | CCTGCCTTTAATTTTTTTGT |
| 8654 | CTGCCTTTAATTTTTTTGTT |
| 8655 | TGCCTTTAATTTTTTTGTTT |
| 8656 | GCCTTTAATTTTTTTGTTTT |
| 8657 | CCTTTAATTTTTTTGTTTTG |
| 8658 | CTTTAATTTTTTTGTTTTGT |
| 8659 | TTTAATTTTTTTGTTTTGTT |
| 8660 | TTAATTTTTTTGTTTTGTTT |
| 8661 | TAATTTTTTTGTTTTGTTTT |
| 8662 | AATTTTTTTGTTTTGTTTTG |
| 8663 | ATTTTTTTGTTTTGTTTTGT |
| 8664 | TTTTTTTGTTTTGTTTTGTT |
| 8665 | TTTTTTGTTTTGTTTTGTTT |
| 8666 | TTTTTGTTTTGTTTTGTTTT |
| 8667 | TTTTGTTTTGTTTTGTTTTC |
| 8668 | TTTGTTTTGTTTTGTTTTCA |
| 8669 | TTGTTTTGTTTTGTTTTCAA |
| 8670 | TGTTTTGTTTTGTTTTCAAT |
| 8671 | GTTTTGTTTTGTTTTCAATT |
| 8672 | TTTTGTTTTGTTTTCAATTT |
| 8673 | TTTGTTTTGTTTTCAATTTA |
| 8674 | TTGTTTTGTTTTCAATTTAA |
| 8675 | TGTTTTGTTTTCAATTTAAA |
| 8676 | GTTTTGTTTTCAATTTAAAG |
| 8677 | TTTTGTTTTCAATTTAAAGA |
| 8678 | TTTGTTTTCAATTTAAAGAA |
| 8679 | TTGTTTTCAATTTAAAGAAA |
| 8680 | TGTTTTCAATTTAAAGAAAG |
| 8681 | GTTTTCAATTTAAAGAAAGA |
| 8682 | TTTTCAATTTAAAGAAAGAC |
| 8683 | TTTCAATTTAAAGAAAGACA |
| 8684 | TTCAATTTAAAGAAAGACAA |
| 8685 | TCAATTTAAAGAAAGACAAC |
| 8686 | CAATTTAAAGAAAGACAACA |
| 8687 | AATTTAAAGAAAGACAACAG |
| 8688 | ATTTAAAGAAAGACAACAGG |
| 8689 | TTTAAAGAAAGACAACAGGG |
| 8690 | TTAAAGAAAGACAACAGGGC |
| 8691 | TAAAGAAAGACAACAGGGCC |
| 8692 | AAAGAAAGACAACAGGGCCT |
| 8693 | AAGAAAGACAACAGGGCCTA |
| 8694 | AGAAAGACAACAGGGCCTAT |
| 8695 | GAAAGACAACAGGGCCTATG |
| 8696 | AAAGACAACAGGGCCTATGG |
| 8697 | AAGACAACAGGGCCTATGGG |
| 8698 | AGACAACAGGGCCTATGGGG |
| 8699 | GACAACAGGGCCTATGGGGA |
| 8700 | ACAACAGGGCCTATGGGGAG |
| 8701 | CAACAGGGCCTATGGGGAGA |
| 8702 | AACAGGGCCTATGGGGAGAG |
| 8703 | ACAGGGCCTATGGGGAGAGG |
| 8704 | CAGGGCCTATGGGGAGAGGG |
| 8705 | AGGGCCTATGGGGAGAGGGG |
| 8706 | GGGCCTATGGGGAGAGGGGC |
| 8707 | GGCCTATGGGGAGAGGGGCC |
| 8708 | GCCTATGGGGAGAGGGGCCC |
| 8709 | CCTATGGGGAGAGGGGCCCC |
| 8710 | CTATGGGGAGAGGGGCCCCT |
| 8711 | TATGGGGAGAGGGGCCCCTG |
| 8712 | ATGGGGAGAGGGGCCCCTGG |
| 8713 | TGGGGAGAGGGGCCCCTGGT |
| 8714 | GGGGAGAGGGGCCCCTGGTG |
| 8715 | GGGAGAGGGGCCCCTGGTGG |
| 8716 | GGAGAGGGGCCCCTGGTGGA |
| 8717 | GAGAGGGGCCCCTGGTGGAC |
| 8718 | AGAGGGGCCCCTGGTGGACT |
| 8719 | GAGGGGCCCCTGGTGGACTA |
| 8720 | AGGGGCCCCTGGTGGACTAA |
| 8721 | GGGGCCCCTGGTGGACTAAC |
| 8722 | GGGCCCCTGGTGGACTAACA |
| 8723 | GGCCCCTGGTGGACTAACAC |
| 8724 | GCCCCTGGTGGACTAACACA |
| 8725 | CCCCTGGTGGACTAACACAC |
| 8726 | CCCTGGTGGACTAACACACC |
| 8727 | CCTGGTGGACTAACACACCC |
| 8728 | CTGGTGGACTAACACACCCT |
| 8729 | TGGTGGACTAACACACCCTA |
| 8730 | GGTGGACTAACACACCCTAC |
| 8731 | GTGGACTAACACACCCTACC |
| 8732 | TGGACTAACACACCCTACCT |
| 8733 | GGACTAACACACCCTACCTG |
| 8734 | GACTAACACACCCTACCTGA |
| 8735 | ACTAACACACCCTACCTGAG |
| 8736 | CTAACACACCCTACCTGAGG |
| 8737 | TAACACACCCTACCTGAGGT |
| 8738 | AACACACCCTACCTGAGGTC |
| 8739 | ACACACCCTACCTGAGGTCA |
| 8740 | CACACCCTACCTGAGGTCAT |
| 8741 | ACACCCTACCTGAGGTCATC |
| 8742 | CACCCTACCTGAGGTCATCT |
| 8743 | ACCCTACCTGAGGTCATCTT |
| 8744 | CCCTACCTGAGGTCATCTTG |
| 8745 | CCTACCTGAGGTCATCTTGC |
| 8746 | CTACCTGAGGTCATCTTGCA |
| 8747 | TACCTGAGGTCATCTTGCAG |
| 8748 | ACCTGAGGTCATCTTGCAGT |
| 8749 | CCTGAGGTCATCTTGCAGTT |
| 8750 | CTGAGGTCATCTTGCAGTTC |
| 8751 | TGAGGTCATCTTGCAGTTCA |
| 8752 | GAGGTCATCTTGCAGTTCAC |
| 8753 | AGGTCATCTTGCAGTTCACC |
| 8754 | GGTCATCTTGCAGTTCACCA |
| 8755 | GTCATCTTGCAGTTCACCAA |
| 8756 | TCATCTTGCAGTTCACCAAA |
| 8757 | CATCTTGCAGTTCACCAAAA |
| 8758 | ATCTTGCAGTTCACCAAAAA |
| 8759 | TCTTGCAGTTCACCAAAAAT |
| 8760 | CTTGCAGTTCACCAAAAATG |
| 8761 | TTGCAGTTCACCAAAAATGG |
| 8762 | TGCAGTTCACCAAAAATGGC |
| 8763 | GCAGTTCACCAAAAATGGCG |
| 8764 | CAGTTCACCAAAAATGGCGG |
| 8765 | AGTTCACCAAAAATGGCGGA |
| 8766 | GTTCACCAAAAATGGCGGAG |
| 8767 | TTCACCAAAAATGGCGGAGA |
| 8768 | TCACCAAAAATGGCGGAGAC |
| 8769 | CACCAAAAATGGCGGAGACC |
| 8770 | ACCAAAAATGGCGGAGACCC |
| 8771 | CCAAAAATGGCGGAGACCCC |
| 8772 | CAAAAATGGCGGAGACCCCT |
| 8773 | AAAAATGGCGGAGACCCCTG |
| 8774 | AAAATGGCGGAGACCCCTGA |
| 8775 | AAATGGCGGAGACCCCTGAG |
| 8776 | AATGGCGGAGACCCCTGAGG |
| 8777 | ATGGCGGAGACCCCTGAGGC |
| 8778 | TGGCGGAGACCCCTGAGGCT |
| 8779 | GGCGGAGACCCCTGAGGCTG |
| 8780 | GCGGAGACCCCTGAGGCTGG |
| 8781 | CGGAGACCCCTGAGGCTGGA |
| 8782 | GGAGACCCCTGAGGCTGGAT |
| 8783 | GAGACCCCTGAGGCTGGATT |
| 8784 | AGACCCCTGAGGCTGGATTT |
| 8785 | GACCCCTGAGGCTGGATTTC |
| 8786 | ACCCCTGAGGCTGGATTTCA |
| 8787 | CCCCTGAGGCTGGATTTCAA |
| 8788 | CCCTGAGGCTGGATTTCAAA |
| 8789 | CCTGAGGCTGGATTTCAAAT |
| 8790 | CTGAGGCTGGATTTCAAATA |
| 8791 | TGAGGCTGGATTTCAAATAG |
| 8792 | GAGGCTGGATTTCAAATAGT |
| 8793 | AGGCTGGATTTCAAATAGTC |
| 8794 | GGCTGGATTTCAAATAGTCC |
| 8795 | GCTGGATTTCAAATAGTCCA |
| 8796 | CTGGATTTCAAATAGTCCAC |
| 8797 | TGGATTTCAAATAGTCCACT |
| 8798 | GGATTTCAAATAGTCCACTC |
| 8799 | GATTTCAAATAGTCCACTCT |
| 8800 | ATTTCAAATAGTCCACTCTG |
| 8801 | TTTCAAATAGTCCACTCTGC |
| 8802 | TTCAAATAGTCCACTCTGCC |
| 8803 | TCAAATAGTCCACTCTGCCT |
| 8804 | CAAATAGTCCACTCTGCCTC |
| 8805 | AAATAGTCCACTCTGCCTCT |
| 8806 | AATAGTCCACTCTGCCTCTC |
| 8807 | ATAGTCCACTCTGCCTCTCC |
| 8808 | TAGTCCACTCTGCCTCTCCC |
| 809 | AGTCCACTCTGCCTCTCCCC |
| 8810 | GTCCACTCTGCCTCTCCCCA |
| 8811 | TCCACTCTGCCTCTCCCCAA |
| 8812 | CCACTCTGCCTCTCCCCAAC |
| 8813 | CACTCTGCCTCTCCCCAACC |
| 8814 | ACTCTGCCTCTCCCCAACCT |
| 8815 | CTCTGCCTCTCCCCAACCTG |
| 8816 | TCTGCCTCTCCCCAACCTGG |
| 8817 | CTGCCTCTCCCCAACCTGGA |
| 8818 | TGCCTCTCCCCAACCTGGAA |
| 8819 | GCCTCTCCCCAACCTGGAAC |
| 8820 | CCTCTCCCCAACCTGGAACA |
| 8821 | CTCTCCCCAACCTGGAACAG |
| 8822 | TCTCCCCAACCTGGAACAGC |
| 8823 | CTCCCCAACCTGGAACAGCT |
| 8824 | TCCCCAACCTGGAACAGCTC |
| 8825 | CCCCAACCTGGAACAGCTCC |
| 8826 | CCCAACCTGGAACAGCTCCT |
| 8827 | CCAACCTGGAACAGCTCCTG |
| 8828 | CAACCTGGAACAGCTCCTGG |
| 8829 | AACCTGGAACAGCTCCTGGC |
| 8830 | ACCTGGAACAGCTCCTGGCA |
| 8831 | CCTGGAACAGCTCCTGGCAA |
| 8832 | CTGGAACAGCTCCTGGCAAT |
| 8833 | TGGAACAGCTCCTGGCAATC |
| 8834 | GGAACAGCTCCTGGCAATCC |
| 8835 | GAACAGCTCCTGGCAATCCC |
| 8836 | AACAGCTCCTGGCAATCCCT |
| 8837 | ACAGCTCCTGGCAATCCCTG |
| 8838 | CAGCTCCTGGCAATCCCTGG |
| 8839 | AGCTCCTGGCAATCCCTGGG |
| 8840 | GCTCCTGGCAATCCCTGGGC |
| 8841 | CTCCTGGCAATCCCTGGGCA |
| 8842 | TCCTGGCAATCCCTGGGCAG |
| 8843 | CCTGGCAATCCCTGGGCAGC |
| 8844 | CTGGCAATCCCTGGGCAGCC |
| 8845 | TGGCAATCCCTGGGCAGCCC |
| 8846 | GGCAATCCCTGGGCAGCCCT |
| 8847 | GCAATCCCTGGGCAGCCCTG |
| 8848 | CAATCCCTGGGCAGCCCTGA |
| 8849 | AATCCCTGGGCAGCCCTGAA |
| 8850 | ATCCCTGGGCAGCCCTGAAG |
| 8851 | TCCCTGGGCAGCCCTGAAGG |
| 8852 | CCCTGGGCAGCCCTGAAGGG |
| 8853 | CCTGGGCAGCCCTGAAGGGA |
| 8854 | CTGGGCAGCCCTGAAGGGAG |
| 8855 | TGGGCAGCCCTGAAGGGAGA |
| 8856 | GGGCAGCCCTGAAGGGAGAT |
| 8857 | GGCAGCCCTGAAGGGAGATA |
| 8858 | GCAGCCCTGAAGGGAGATAA |
| 8859 | CAGCCCTGAAGGGAGATAAA |
| 8860 | AGCCCTGAAGGGAGATAAAG |
| 8861 | GCCCTGAAGGGAGATAAAGT |
| 8862 | CCCTGAAGGGAGATAAAGTG |
| 8863 | CCTGAAGGGAGATAAAGTGG |
| 8864 | CTGAAGGGAGATAAAGTGGA |
| 8865 | TGAAGGGAGATAAAGTGGAG |
| 8866 | GAAGGGAGATAAAGTGGAGA |
| 8867 | AAGGGAGATAAAGTGGAGAC |
| 8868 | AGGGAGATAAAGTGGAGACT |
| 8869 | GGGAGATAAAGTGGAGACTT |
| 8870 | GGAGATAAAGTGGAGACTTG |
| 8871 | GAGATAAAGTGGAGACTTGA |
| 8872 | AGATAAAGTGGAGACTTGAA |
| 8873 | GATAAAGTGGAGACTTGAAA |
| 8874 | ATAAAGTGGAGACTTGAAAC |
| 8875 | TAAAGTGGAGACTTGAAACA |
| 8876 | AAAGTGGAGACTTGAAACAG |
| 8877 | AAGTGGAGACTTGAAACAGG |
| 8878 | AGTGGAGACTTGAAACAGGA |
| 8879 | GTGGAGACTTGAAACAGGAG |
| 8880 | TGGAGACTTGAAACAGGAGG |
| 8881 | GGAGACTTGAAACAGGAGGG |
| 8882 | GAGACTTGAAACAGGAGGGC |
| 8883 | AGACTTGAAACAGGAGGGCA |
| 8884 | GACTTGAAACAGGAGGGCAG |
| 8885 | ACTTGAAACAGGAGGGCAGC |
| 8886 | CTTGAAACAGGAGGGCAGCC |
| 8887 | TTGAAACAGGAGGGCAGCCC |
| 8888 | TGAAACAGGAGGGCAGCCCC |
| 8889 | GAAACAGGAGGGCAGCCCCT |
| 8890 | AAACAGGAGGGCAGCCCCTG |
| 8891 | AACAGGAGGGCAGCCCCTGG |
| 8892 | ACAGGAGGGCAGCCCCTGGG |
| 8893 | CAGGAGGGCAGCCCCTGGGG |
| 8894 | AGGAGGGCAGCCCCTGGGGG |
| 8895 | GGAGGGCAGCCCCTGGGGGG |
| 8896 | GAGGGCAGCCCCTGGGGGGG |
| 8897 | AGGGCAGCCCCTGGGGGGGG |
| 8898 | GGGCAGCCCCTGGGGGGGGT |
| 8899 | GGCAGCCCCTGGGGGGGGTC |
| 8900 | GCAGCCCCTGGGGGGGGTCT |
| 8901 | CAGCCCCTGGGGGGGGTCTC |
| 8902 | AGCCCCTGGGGGGGGTCTCA |
| 8903 | GCCCCTGGGGGGGGTCTCAG |
| 8904 | CCCCTGGGGGGGGTCTCAGG |
| 8905 | CCCTGGGGGGGGTCTCAGGA |
| 8906 | CCTGGGGGGGGTCTCAGGAG |
| 8907 | CTGGGGGGGGTCTCAGGAGC |
| 8908 | TGGGGGGGGTCTCAGGAGCC |
| 8909 | GGGGGGGGTCTCAGGAGCCA |
| 8910 | GGGGGGGTCTCAGGAGCCAG |
| 8911 | GGGGGGTCTCAGGAGCCAGG |
| 8912 | GGGGGTCTCAGGAGCCAGGC |
| 8913 | GGGGTCTCAGGAGCCAGGCA |
| 8914 | GGGTCTCAGGAGCCAGGCAT |
| 8915 | GGTCTCAGGAGCCAGGCATA |
| 8916 | GTCTCAGGAGCCAGGCATAT |
| 8917 | TCTCAGGAGCCAGGCATATC |
| 8918 | CTCAGGAGCCAGGCATATCT |
| 8919 | TCAGGAGCCAGGCATATCTG |
| 8920 | CAGGAGCCAGGCATATCTGG |
| 8921 | AGGAGCCAGGCATATCTGGG |
| 8922 | GGAGCCAGGCATATCTGGGG |
| 8923 | GAGCCAGGCATATCTGGGGG |
| 8924 | AGCCAGGCATATCTGGGGGC |
| 8925 | GCCAGGCATATCTGGGGGCT |
| 8926 | CCAGGCATATCTGGGGGCTT |
| 8927 | CAGGCATATCTGGGGGCTTA |
| 8928 | AGGCATATCTGGGGGCTTAA |
| 8929 | GGCATATCTGGGGGCTTAAC |
| 8930 | GCATATCTGGGGGCTTAACA |
| 8931 | CATATCTGGGGGCTTAACAG |
| 8932 | ATATCTGGGGGCTTAACAGT |
| 8933 | TATCTGGGGGCTTAACAGTG |
| 8934 | ATCTGGGGGCTTAACAGTGG |
| 8935 | TCTGGGGGCTTAACAGTGGA |
| 8936 | CTGGGGGCTTAACAGTGGAT |
| 8937 | TGGGGGCTTAACAGTGGATG |
| 8938 | GGGGGCTTAACAGTGGATGA |
| 8939 | GGGGCTTAACAGTGGATGAC |
| 8940 | GGGCTTAACAGTGGATGACC |
| 8941 | GGCTTAACAGTGGATGACCA |
| 8942 | GCTTAACAGTGGATGACCAG |
| 8943 | CTTAACAGTGGATGACCAGG |
| 8944 | TTAACAGTGGATGACCAGGG |
| 8945 | TAACAGTGGATGACCAGGGA |
| 8946 | AACAGTGGATGACCAGGGAA |
| 8947 | ACAGTGGATGACCAGGGAAG |
| 8948 | CAGTGGATGACCAGGGAAGT |
| 8949 | AGTGGATGACCAGGGAAGTA |
| 8950 | GTGGATGACCAGGGAAGTAA |
| 8951 | TGGATGACCAGGGAAGTAAA |
| 8952 | GGATGACCAGGGAAGTAAAA |
| 8953 | GATGACCAGGGAAGTAAAAG |
| 8954 | ATGACCAGGGAAGTAAAAGG |
| 8955 | TGACCAGGGAAGTAAAAGGC |
| 8956 | GACCAGGGAAGTAAAAGGCA |
| 8957 | ACCAGGGAAGTAAAAGGCAA |
| 8958 | CCAGGGAAGTAAAAGGCAAA |
| 8959 | CAGGGAAGTAAAAGGCAAAT |
| 8960 | AGGGAAGTAAAAGGCAAATC |
| 8961 | GGGAAGTAAAAGGCAAATCT |
| 8962 | GGAAGTAAAAGGCAAATCTT |
| 8963 | GAAGTAAAAGGCAAATCTTA |
| 8964 | AAGTAAAAGGCAAATCTTAT |
| 8965 | AGTAAAAGGCAAATCTTATC |
| 8966 | GTAAAAGGCAAATCTTATCT |
| 8967 | TAAAAGGCAAATCTTATCTC |
| 8968 | AAAAGGCAAATCTTATCTCA |
| 8969 | AAAGGCAAATCTTATCTCAT |
| 8970 | AAGGCAAATCTTATCTCATG |
| 8971 | AGGCAAATCTTATCTCATGA |
| 8972 | GGCAAATCTTATCTCATGAC |
| 8973 | GCAAATCTTATCTCATGACC |
| 8974 | CAAATCTTATCTCATGACCA |
| 8975 | AAATCTTATCTCATGACCAC |
| 8976 | AATCTTATCTCATGACCACC |
| 8977 | ATCTTATCTCATGACCACCT |
| 8978 | TCTTATCTCATGACCACCTC |
| 8979 | CTTATCTCATGACCACCTCT |
| 8980 | TTATCTCATGACCACCTCTC |
| 8981 | TATCTCATGACCACCTCTCT |
| 8982 | ATCTCATGACCACCTCTCTG |
| 8983 | TCTCATGACCACCTCTCTGC |
| 8984 | CTCATGACCACCTCTCTGCC |
| 8985 | TCATGACCACCTCTCTGCCA |
| 8986 | CATGACCACCTCTCTGCCAT |
| 8987 | ATGACCACCTCTCTGCCATC |
| 8988 | TGACCACCTCTCTGCCATCT |
| 8989 | GACCACCTCTCTGCCATCTG |
| 8990 | ACCACCTCTCTGCCATCTGC |
| 8991 | CCACCTCTCTGCCATCTGCC |
| 8992 | CACCTCTCTGCCATCTGCCT |
| 8993 | ACCTCTCTGCCATCTGCCTA |
| 8994 | CCTCTCTGCCATCTGCCTAA |
| 8995 | CTCTCTGCCATCTGCCTAAC |
| 8996 | TCTCTGCCATCTGCCTAACC |
| 8997 | CTCTGCCATCTGCCTAACCT |
| 8998 | TCTGCCATCTGCCTAACCTC |
| 8999 | CTGCCATCTGCCTAACCTCT |
| 9000 | TGCCATCTGCCTAACCTCTT |
| 9001 | GCCATCTGCCTAACCTCTTC |
| 9002 | CCATCTGCCTAACCTCTTCC |
| 9003 | CATCTGCCTAACCTCTTCCA |
| 9004 | ATCTGCCTAACCTCTTCCAT |
| 9005 | TCTGCCTAACCTCTTCCATG |
| 9006 | CTGCCTAACCTCTTCCATGG |
| 9007 | TGCCTAACCTCTTCCATGGC |
| 9008 | GCCTAACCTCTTCCATGGCT |
| 9009 | CCTAACCTCTTCCATGGCTC |
| 9010 | CTAACCTCTTCCATGGCTCC |
| 9011 | TAACCTCTTCCATGGCTCCC |
| 9012 | AACCTCTTCCATGGCTCCCT |
| 9013 | ACCTCTTCCATGGCTCCCTA |
| 9014 | CCTCTTCCATGGCTCCCTAT |
| 9015 | CTCTTCCATGGCTCCCTATG |
| 9016 | TCTTCCATGGCTCCCTATGT |
| 9017 | CTTCCATGGCTCCCTATGTC |
| 9018 | TTCCATGGCTCCCTATGTCC |
| 9019 | TCCATGGCTCCCTATGTCCT |
| 9020 | CCATGGCTCCCTATGTCCTT |
| 9021 | CATGGCTCCCTATGTCCTTC |
| 9022 | ATGGCTCCCTATGTCCTTCC |
| 9023 | TGGCTCCCTATGTCCTTCCT |
| 9024 | GGCTCCCTATGTCCTTCCTC |
| 9025 | GCTCCCTATGTCCTTCCTCA |
| 9026 | CTCCCTATGTCCTTCCTCAG |
| 9027 | TCCCTATGTCCTTCCTCAGC |
| 9028 | CCCTATGTCCTTCCTCAGCA |
| 9029 | CCTATGTCCTTCCTCAGCAT |
| 9030 | CTATGTCCTTCCTCAGCATG |
| 9031 | TATGTCCTTCCTCAGCATGG |
| 9032 | ATGTCCTTCCTCAGCATGGT |
| 9033 | TGTCCTTCCTCAGCATGGTC |
| 9034 | GTCCTTCCTCAGCATGGTCC |
| 9035 | TCCTTCCTCAGCATGGTCCA |
| 9036 | CCTTCCTCAGCATGGTCCAC |
| 9037 | CTTCCTCAGCATGGTCCACA |
| 9038 | TTCCTCAGCATGGTCCACAA |
| 9039 | TCCTCAGCATGGTCCACAAG |
| 9040 | CCTCAGCATGGTCCACAAGG |
| 9041 | CTCAGCATGGTCCACAAGGC |
| 9042 | TCAGCATGGTCCACAAGGCA |
| 9043 | CAGCATGGTCCACAAGGCAC |
| 9044 | AGCATGGTCCACAAGGCACC |
| 9045 | GCATGGTCCACAAGGCACCT |
| 9046 | CATGGTCCACAAGGCACCTG |
| 9047 | ATGGTCCACAAGGCACCTGG |
| 9048 | TGGTCCACAAGGCACCTGGA |
| 9049 | GGTCCACAAGGCACCTGGAG |
| 9050 | GTCCACAAGGCACCTGGAGG |
| 9051 | TCCACAAGGCACCTGGAGGA |
| 9052 | CCACAAGGCACCTGGAGGAC |
| 9053 | CACAAGGCACCTGGAGGACC |
| 9054 | ACAAGGCACCTGGAGGACCA |
| 9055 | CAAGGCACCTGGAGGACCAG |
| 9056 | AAGGCACCTGGAGGACCAGC |
| 9057 | AGGCACCTGGAGGACCAGCC |
| 9058 | GGCACCTGGAGGACCAGCCC |
| 9059 | GCACCTGGAGGACCAGCCCC |
| 9060 | CACCTGGAGGACCAGCCCCC |
| 9061 | ACCTGGAGGACCAGCCCCCG |
| 9062 | CCTGGAGGACCAGCCCCCGT |
| 9063 | CTGGAGGACCAGCCCCCGTG |
| 9064 | TGGAGGACCAGCCCCCGTGC |
| 9065 | GGAGGACCAGCCCCCGTGCC |
| 9066 | GAGGACCAGCCCCCGTGCCC |
| 9067 | AGGACCAGCCCCCGTGCCCA |
| 9068 | GGACCAGCCCCCGTGCCCAT |
| 9069 | GACCAGCCCCCGTGCCCATC |
| 9070 | ACCAGCCCCCGTGCCCATCC |
| 9071 | CCAGCCCCCGTGCCCATCCT |
| 9072 | CAGCCCCCGTGCCCATCCTC |
| 9073 | AGCCCCCGTGCCCATCCTCC |
| 9074 | GCCCCCGTGCCCATCCTCCT |
| 9075 | CCCCCGTGCCCATCCTCCTC |
| 9076 | CCCCGTGCCCATCCTCCTCC |
| 9077 | CCCGTGCCCATCCTCCTCCT |
| 9078 | CCGTGCCCATCCTCCTCCTG |
| 9079 | CGTGCCCATCCTCCTCCTGC |
| 9080 | GTGCCCATCCTCCTCCTGCC |
| 9081 | TGCCCATCCTCCTCCTGCCA |
| 9082 | GCCCATCCTCCTCCTGCCAT |
| 9083 | CCCATCCTCCTCCTGCCATG |
| 9084 | CCATCCTCCTCCTGCCATGC |
| 9085 | CATCCTCCTCCTGCCATGCT |
| 9086 | ATCCTCCTCCTGCCATGCTG |
| 9087 | TCCTCCTCCTGCCATGCTGT |
| 9088 | CCTCCTCCTGCCATGCTGTA |
| 9089 | CTCCTCCTGCCATGCTGTAC |
| 9090 | TCCTCCTGCCATGCTGTACC |
| 9091 | CCTCCTGCCATGCTGTACCC |
| 9092 | CTCCTGCCATGCTGTACCCA |
| 9093 | TCCTGCCATGCTGTACCCAC |
| 9094 | CCTGCCATGCTGTACCCACA |
| 9095 | CTGCCATGCTGTACCCACAC |
| 9096 | TGCCATGCTGTACCCACACC |
| 9097 | GCCATGCTGTACCCACACCC |
| 9098 | CCATGCTGTACCCACACCCT |
| 9099 | CATGCTGTACCCACACCCTC |
| 9100 | ATGCTGTACCCACACCCTCT |
| 9101 | TGCTGTACCCACACCCTCTC |
| 9102 | GCTGTACCCACACCCTCTCT |
| 9103 | CTGTACCCACACCCTCTCTG |
| 9104 | TGTACCCACACCCTCTCTGG |
| 9105 | GTACCCACACCCTCTCTGGC |
| 9106 | TACCCACACCCTCTCTGGCA |
| 9107 | ACCCACACCCTCTCTGGCAC |
| 9108 | CCCACACCCTCTCTGGCACA |
| 9109 | CCACACCCTCTCTGGCACAC |
| 9110 | CACACCCTCTCTGGCACACA |
| 9111 | ACACCCTCTCTGGCACACAG |
| 9112 | CACCCTCTCTGGCACACAGG |
| 9113 | ACCCTCTCTGGCACACAGGC |
| 9114 | CCCTCTCTGGCACACAGGCT |
| 9115 | CCTCTCTGGCACACAGGCTT |
| 9116 | CTCTCTGGCACACAGGCTTT |
| 9117 | TCTCTGGCACACAGGCTTTC |
| 9118 | CTCTGGCACACAGGCTTTCT |
| 9119 | TCTGGCACACAGGCTTTCTT |
| 9120 | CTGGCACACAGGCTTTCTTC |
| 9121 | TGGCACACAGGCTTTCTTCC |
| 9122 | GGCACACAGGCTTTCTTCCC |
| 9123 | GCACACAGGCTTTCTTCCCA |
| 9124 | CACACAGGCTTTCTTCCCAC |
| 9125 | ACACAGGCTTTCTTCCCACC |
| 9126 | CACAGGCTTTCTTCCCACCC |
| 9127 | ACAGGCTTTCTTCCCACCCT |
| 9128 | CAGGCTTTCTTCCCACCCTT |
| 9129 | AGGCTTTCTTCCCACCCTTG |
| 9130 | GGCTTTCTTCCCACCCTTGT |
| 9131 | GCTTTCTTCCCACCCTTGTA |
| 9132 | CTTTCTTCCCACCCTTGTAC |
| 9133 | TTTCTTCCCACCCTTGTACC |
| 9134 | TTCTTCCCACCCTTGTACCA |
| 9135 | TCTTCCCACCCTTGTACCAC |
| 9136 | CTTCCCACCCTTGTACCACA |
| 9137 | TTCCCACCCTTGTACCACAC |
| 9138 | TCCCACCCTTGTACCACACA |
| 9139 | CCCACCCTTGTACCACACAC |
| 9140 | CCACCCTTGTACCACACACC |
| 9141 | CACCCTTGTACCACACACCG |
| 9142 | ACCCTTGTACCACACACCGT |
| 9143 | CCCTTGTACCACACACCGTC |
| 9144 | CCTTGTACCACACACCGTCC |
| 9145 | CTTGTACCACACACCGTCCT |
| 9146 | TTGTACCACACACCGTCCTG |
| 9147 | TGTACCACACACCGTCCTGC |
| 9148 | GTACCACACACCGTCCTGCC |
| 9149 | TACCACACACCGTCCTGCCA |
| 9150 | ACCACACACCGTCCTGCCAC |
| 9151 | CCACACACCGTCCTGCCACA |
| 9152 | CACACACCGTCCTGCCACAG |
| 9153 | ACACACCGTCCTGCCACAGG |
| 9154 | CACACCGTCCTGCCACAGGG |
| 9155 | ACACCGTCCTGCCACAGGGA |
| 9156 | CACCGTCCTGCCACAGGGAC |
| 9157 | ACCGTCCTGCCACAGGGACT |
| 9158 | CCGTCCTGCCACAGGGACTT |
| 9159 | CGTCCTGCCACAGGGACTTT |
| 9160 | GTCCTGCCACAGGGACTTTG |
| 9161 | TCCTGCCACAGGGACTTTGC |
| 9162 | CCTGCCACAGGGACTTTGCA |
| 9163 | CTGCCACAGGGACTTTGCAC |
| 9164 | TGCCACAGGGACTTTGCACA |
| 9165 | GCCACAGGGACTTTGCACAT |
| 9166 | CCACAGGGACTTTGCACATG |
| 9167 | CACAGGGACTTTGCACATGC |
| 9168 | ACAGGGACTTTGCACATGCT |
| 9169 | CAGGGACTTTGCACATGCTG |
| 9170 | AGGGACTTTGCACATGCTGT |
| 9171 | GGGACTTTGCACATGCTGTT |
| 9172 | GGACTTTGCACATGCTGTTC |
| 9173 | GACTTTGCACATGCTGTTCC |
| 9174 | ACTTTGCACATGCTGTTCCC |
| 9175 | CTTTGCACATGCTGTTCCCC |
| 9176 | TTTGCACATGCTGTTCCCCC |
| 9177 | TTGCACATGCTGTTCCCCCT |
| 9178 | TGCACATGCTGTTCCCCCTG |
| 9179 | GCACATGCTGTTCCCCCTGC |
| 9180 | CACATGCTGTTCCCCCTGCC |
| 9181 | ACATGCTGTTCCCCCTGCCT |
| 9182 | CATGCTGTTCCCCCTGCCTG |
| 9183 | ATGCTGTTCCCCCTGCCTGG |
| 9184 | TGCTGTTCCCCCTGCCTGGG |
| 9185 | GCTGTTCCCCCTGCCTGGGA |
| 9186 | CTGTTCCCCCTGCCTGGGAC |
| 9187 | TGTTCCCCCTGCCTGGGACT |
| 9188 | GTTCCCCCTGCCTGGGACTC |
| 9189 | TTCCCCCTGCCTGGGACTCT |
| 9190 | TCCCCCTGCCTGGGACTCTC |
| 9191 | CCCCCTGCCTGGGACTCTCT |
| 9192 | CCCCTGCCTGGGACTCTCTT |
| 9193 | CCCTGCCTGGGACTCTCTTT |
| 9194 | CCTGCCTGGGACTCTCTTTT |
| 9195 | CTGCCTGGGACTCTCTTTTT |
| 9196 | TGCCTGGGACTCTCTTTTTT |
| 9197 | GCCTGGGACTCTCTTTTTTT |
| 9198 | CCTGGGACTCTCTTTTTTTG |
| 9199 | CTGGGACTCTCTTTTTTTGT |
| 9200 | TGGGACTCTCTTTTTTTGTT |
| 9201 | GGGACTCTCTTTTTTTGTTT |
| 9202 | GGACTCTCTTTTTTTGTTTT |
| 9203 | GACTCTCTTTTTTTGTTTTG |
| 9204 | ACTCTCTTTTTTTGTTTTGT |
| 9205 | CTCTCTTTTTTTGTTTTGTT |
| 9206 | TCTCTTTTTTTGTTTTGTTT |
| 9207 | CTCTTTTTTTGTTTTGTTTT |
| 9208 | TCTTTTTTTGTTTTGTTTTT |
| 9209 | CTTTTTTTGTTTTGTTTTTT |
| 9210 | TTTTTTTGTTTTGTTTTTTG |
| 9211 | TTTTTTGTTTTGTTTTTTGA |
| 9212 | TTTTTGTTTTGTTTTTTGAT |
| 9213 | TTTTGTTTTGTTTTTTGATA |
| 9214 | TTTGTTTTGTTTTTTGATAC |
| 9215 | TTGTTTTGTTTTTTGATACG |
| 9216 | TGTTTTGTTTTTTGATACGG |
| 9217 | GTTTTGTTTTTTGATACGGA |
| 9218 | TTTTGTTTTTTGATACGGAG |
| 9219 | TTTGTTTTTTGATACGGAGT |
| 9220 | TTGTTTTTTGATACGGAGTC |
| 9221 | TGTTTTTTGATACGGAGTCT |
| 9222 | GTTTTTTGATACGGAGTCTC |
| 9223 | TTTTTTGATACGGAGTCTCG |
| 9224 | TTTTTGATACGGAGTCTCGC |
| 9225 | TTTTGATACGGAGTCTCGCT |
| 9226 | TTTGATACGGAGTCTCGCTC |
| 9227 | TTGATACGGAGTCTCGCTCT |
| 9228 | TGATACGGAGTCTCGCTCTG |
| 9229 | GATACGGAGTCTCGCTCTGT |
| 9230 | ATACGGAGTCTCGCTCTGTC |
| 9231 | TACGGAGTCTCGCTCTGTCG |
| 9232 | ACGGAGTCTCGCTCTGTCGC |
| 9233 | CGGAGTCTCGCTCTGTCGCC |
| 9234 | GGAGTCTCGCTCTGTCGCCA |
| 9235 | GAGTCTCGCTCTGTCGCCAG |
| 9236 | AGTCTCGCTCTGTCGCCAGG |
| 9237 | GTCTCGCTCTGTCGCCAGGC |
| 9238 | TCTCGCTCTGTCGCCAGGCT |
| 9239 | CTCGCTCTGTCGCCAGGCTG |
| 9240 | TCGCTCTGTCGCCAGGCTGG |
| 9241 | CGCTCTGTCGCCAGGCTGGA |
| 9242 | GCTCTGTCGCCAGGCTGGAG |
| 9243 | CTCTGTCGCCAGGCTGGAGT |
| 9244 | TCTGTCGCCAGGCTGGAGTG |
| 9245 | CTGTCGCCAGGCTGGAGTGC |
| 9246 | TGTCGCCAGGCTGGAGTGCA |
| 9247 | GTCGCCAGGCTGGAGTGCAG |
| 9248 | TCGCCAGGCTGGAGTGCAGT |
| 9249 | CGCCAGGCTGGAGTGCAGTG |
| 9250 | GCCAGGCTGGAGTGCAGTGG |
| 9251 | CCAGGCTGGAGTGCAGTGGC |
| 9252 | CAGGCTGGAGTGCAGTGGCG |
| 9253 | AGGCTGGAGTGCAGTGGCGC |
| 9254 | GGCTGGAGTGCAGTGGCGCA |
| 9255 | GCTGGAGTGCAGTGGCGCAA |
| 9256 | CTGGAGTGCAGTGGCGCAAT |
| 9257 | TGGAGTGCAGTGGCGCAATC |
| 9258 | GGAGTGCAGTGGCGCAATCT |
| 9259 | GAGTGCAGTGGCGCAATCTT |
| 9260 | AGTGCAGTGGCGCAATCTTG |
| 9261 | GTGCAGTGGCGCAATCTTGG |
| 9262 | TGCAGTGGCGCAATCTTGGC |
| 9263 | GCAGTGGCGCAATCTTGGCT |
| 9264 | CAGTGGCGCAATCTTGGCTC |
| 9265 | AGTGGCGCAATCTTGGCTCA |
| 9266 | GTGGCGCAATCTTGGCTCAC |
| 9267 | TGGCGCAATCTTGGCTCACT |
| 9268 | GGCGCAATCTTGGCTCACTG |
| 9269 | GCGCAATCTTGGCTCACTGC |
| 9270 | CGCAATCTTGGCTCACTGCA |
| 9271 | GCAATCTTGGCTCACTGCAA |
| 9272 | CAATCTTGGCTCACTGCAAC |
| 9273 | AATCTTGGCTCACTGCAACC |
| 9274 | ATCTTGGCTCACTGCAACCT |
| 9275 | TCTTGGCTCACTGCAACCTC |
| 9276 | CTTGGCTCACTGCAACCTCC |
| 9277 | TTGGCTCACTGCAACCTCCG |
| 9278 | TGGCTCACTGCAACCTCCGC |
| 9279 | GGCTCACTGCAACCTCCGCC |
| 9280 | GCTCACTGCAACCTCCGCCT |
| 9281 | CTCACTGCAACCTCCGCCTC |
| 9282 | TCACTGCAACCTCCGCCTCC |
| 9283 | CACTGCAACCTCCGCCTCCC |
| 9284 | ACTGCAACCTCCGCCTCCCA |
| 9285 | CTGCAACCTCCGCCTCCCAG |
| 9286 | TGCAACCTCCGCCTCCCAGG |
| 9287 | GCAACCTCCGCCTCCCAGGT |
| 9288 | CAACCTCCGCCTCCCAGGTT |
| 9289 | AACCTCCGCCTCCCAGGTTC |
| 9290 | ACCTCCGCCTCCCAGGTTCA |
| 9291 | CCTCCGCCTCCCAGGTTCAA |
| 9292 | CTCCGCCTCCCAGGTTCAAG |
| 9293 | TCCGCCTCCCAGGTTCAAGC |
| 9294 | CCGCCTCCCAGGTTCAAGCA |
| 9295 | CGCCTCCCAGGTTCAAGCAA |
| 9296 | GCCTCCCAGGTTCAAGCAAT |
| 9297 | CCTCCCAGGTTCAAGCAATT |
| 9298 | CTCCCAGGTTCAAGCAATTC |
| 9299 | TCCCAGGTTCAAGCAATTCT |
| 9300 | CCCAGGTTCAAGCAATTCTG |
| 9301 | CCAGGTTCAAGCAATTCTGC |
| 9302 | CAGGTTCAAGCAATTCTGCC |
| 9303 | AGGTTCAAGCAATTCTGCCG |
| 9304 | GGTTCAAGCAATTCTGCCGC |
| 9305 | GTTCAAGCAATTCTGCCGCA |
| 9306 | TTCAAGCAATTCTGCCGCAG |
| 9307 | TCAAGCAATTCTGCCGCAGC |
| 9308 | CAAGCAATTCTGCCGCAGCC |
| 9309 | AAGCAATTCTGCCGCAGCCT |
| 9310 | AGCAATTCTGCCGCAGCCTC |
| 9311 | GCAATTCTGCCGCAGCCTCC |
| 9312 | CAATTCTGCCGCAGCCTCCG |
| 9313 | AATTCTGCCGCAGCCTCCGG |
| 9314 | ATTCTGCCGCAGCCTCCGGA |
| 9315 | TTCTGCCGCAGCCTCCGGAG |
| 9316 | TCTGCCGCAGCCTCCGGAGC |
| 9317 | CTGCCGCAGCCTCCGGAGCA |
| 9318 | TGCCGCAGCCTCCGGAGCAG |
| 9319 | GCCGCAGCCTCCGGAGCAGC |
| 9320 | CCGCAGCCTCCGGAGCAGCT |
| 9321 | CGCAGCCTCCGGAGCAGCTG |
| 9322 | GCAGCCTCCGGAGCAGCTGG |
| 9323 | CAGCCTCCGGAGCAGCTGGG |
| 9324 | AGCCTCCGGAGCAGCTGGGA |
| 9325 | GCCTCCGGAGCAGCTGGGAC |
| 9326 | CCTCCGGAGCAGCTGGGACT |
| 9327 | CTCCGGAGCAGCTGGGACTA |
| 9328 | TCCGGAGCAGCTGGGACTAC |
| 9329 | CCGGAGCAGCTGGGACTACA |
| 9330 | CGGAGCAGCTGGGACTACAG |
| 9331 | GGAGCAGCTGGGACTACAGG |
| 9332 | GAGCAGCTGGGACTACAGGC |
| 9333 | AGCAGCTGGGACTACAGGCA |
| 9334 | GCAGCTGGGACTACAGGCAT |
| 9335 | CAGCTGGGACTACAGGCATG |
| 9336 | AGCTGGGACTACAGGCATGT |
| 9337 | GCTGGGACTACAGGCATGTG |
| 9338 | CTGGGACTACAGGCATGTGC |
| 9339 | TGGGACTACAGGCATGTGCC |
| 9340 | GGGACTACAGGCATGTGCCA |
| 9341 | GGACTACAGGCATGTGCCAC |
| 9342 | GACTACAGGCATGTGCCACC |
| 9343 | ACTACAGGCATGTGCCACCA |
| 9344 | CTACAGGCATGTGCCACCAC |
| 9345 | TACAGGCATGTGCCACCACG |
| 9346 | ACAGGCATGTGCCACCACGC |
| 9347 | CAGGCATGTGCCACCACGCC |
| 9348 | AGGCATGTGCCACCACGCCC |
| 9349 | GGCATGTGCCACCACGCCCG |
| 9350 | GCATGTGCCACCACGCCCGA |
| 9351 | CATGTGCCACCACGCCCGAC |
| 9352 | ATGTGCCACCACGCCCGACT |
| 9353 | TGTGCCACCACGCCCGACTA |
| 9354 | GTGCCACCACGCCCGACTAG |
| 9355 | TGCCACCACGCCCGACTAGT |
| 9356 | GCCACCACGCCCGACTAGTT |
| 9357 | CCACCACGCCCGACTAGTTT |
| 9358 | CACCACGCCCGACTAGTTTT |
| 9359 | ACCACGCCCGACTAGTTTTT |
| 9360 | CCACGCCCGACTAGTTTTTG |
| 9361 | CACGCCCGACTAGTTTTTGC |
| 9362 | ACGCCCGACTAGTTTTTGCA |
| 9363 | CGCCCGACTAGTTTTTGCAT |
| 9364 | GCCCGACTAGTTTTTGCATT |
| 9365 | CCCGACTAGTTTTTGCATTA |
| 9366 | CCGACTAGTTTTTGCATTAT |
| 9367 | CGACTAGTTTTTGCATTATT |
| 9368 | GACTAGTTTTTGCATTATTT |
| 9369 | ACTAGTTTTTGCATTATTTG |
| 9370 | CTAGTTTTTGCATTATTTGT |
| 9371 | TAGTTTTTGCATTATTTGTA |
| 9372 | AGTTTTTGCATTATTTGTAG |
| 9373 | GTTTTTGCATTATTTGTAGA |
| 9374 | TTTTTGCATTATTTGTAGAG |
| 9375 | TTTTGCATTATTTGTAGAGA |
| 9376 | TTTGCATTATTTGTAGAGAC |
| 9377 | TTGCATTATTTGTAGAGACG |
| 9378 | TGCATTATTTGTAGAGACGG |
| 9379 | GCATTATTTGTAGAGACGGG |
| 9380 | CATTATTTGTAGAGACGGGG |
| 9381 | ATTATTTGTAGAGACGGGGG |
| 9382 | TTATTTGTAGAGACGGGGGT |
| 9383 | TATTTGTAGAGACGGGGGTT |
| 9384 | ATTTGTAGAGACGGGGGTTT |
| 9385 | TTTGTAGAGACGGGGGTTTC |
| 9386 | TTGTAGAGACGGGGGTTTCA |
| 9387 | TGTAGAGACGGGGGTTTCAC |
| 9388 | GTAGAGACGGGGGTTTCACC |
| 9389 | TAGAGACGGGGGTTTCACCA |
| 9390 | AGAGACGGGGGTTTCACCAT |
| 9391 | GAGACGGGGGTTTCACCATG |
| 9392 | AGACGGGGGTTTCACCATGT |
| 9393 | GACGGGGGTTTCACCATGTT |
| 9394 | ACGGGGGTTTCACCATGTTG |
| 9395 | CGGGGGTTTCACCATGTTGG |
| 9396 | GGGGGTTTCACCATGTTGGC |
| 9397 | GGGGTTTCACCATGTTGGCC |
| 9398 | GGGTTTCACCATGTTGGCCA |
| 9399 | GGTTTCACCATGTTGGCCAG |
| 9400 | GTTTCACCATGTTGGCCAGA |
| 9401 | TTTCACCATGTTGGCCAGAC |
| 9402 | TTCACCATGTTGGCCAGACT |
| 9403 | TCACCATGTTGGCCAGACTG |
| 9404 | CACCATGTTGGCCAGACTGG |
| 9405 | ACCATGTTGGCCAGACTGGT |
| 9406 | CCATGTTGGCCAGACTGGTC |
| 9407 | CATGTTGGCCAGACTGGTCT |
| 9408 | ATGTTGGCCAGACTGGTCTC |
| 9409 | TGTTGGCCAGACTGGTCTCG |
| 9410 | GTTGGCCAGACTGGTCTCGA |
| 9411 | TTGGCCAGACTGGTCTCGAT |
| 9412 | TGGCCAGACTGGTCTCGATC |
| 9413 | GGCCAGACTGGTCTCGATCT |
| 9414 | GCCAGACTGGTCTCGATCTC |
| 9415 | CCAGACTGGTCTCGATCTCC |
| 9416 | CAGACTGGTCTCGATCTCCT |
| 9417 | AGACTGGTCTCGATCTCCTG |
| 9418 | GACTGGTCTCGATCTCCTGA |
| 9419 | ACTGGTCTCGATCTCCTGAC |
| 9420 | CTGGTCTCGATCTCCTGACC |
| 9421 | TGGTCTCGATCTCCTGACCT |
| 9422 | GGTCTCGATCTCCTGACCTC |
| 9423 | GTCTCGATCTCCTGACCTCG |
| 9424 | TCTCGATCTCCTGACCTCGT |
| 9425 | CTCGATCTCCTGACCTCGTG |
| 9426 | TCGATCTCCTGACCTCGTGA |
| 9427 | CGATCTCCTGACCTCGTGAT |
| 9428 | GATCTCCTGACCTCGTGATC |
| 9429 | ATCTCCTGACCTCGTGATCC |
| 9430 | TCTCCTGACCTCGTGATCCG |
| 9431 | CTCCTGACCTCGTGATCCGC |
| 9432 | TCCTGACCTCGTGATCCGCC |
| 9433 | CCTGACCTCGTGATCCGCCA |
| 9434 | CTGACCTCGTGATCCGCCAG |
| 9435 | TGACCTCGTGATCCGCCAGC |
| 9436 | GACCTCGTGATCCGCCAGCC |
| 9437 | ACCTCGTGATCCGCCAGCCT |
| 9438 | CCTCGTGATCCGCCAGCCTT |
| 9439 | CTCGTGATCCGCCAGCCTTG |
| 9440 | TCGTGATCCGCCAGCCTTGG |
| 9441 | CGTGATCCGCCAGCCTTGGC |
| 9442 | GTGATCCGCCAGCCTTGGCC |
| 9443 | TGATCCGCCAGCCTTGGCCT |
| 9444 | GATCCGCCAGCCTTGGCCTC |
| 9445 | ATCCGCCAGCCTTGGCCTCC |
| 9446 | TCCGCCAGCCTTGGCCTCCC |
| 9447 | CCGCCAGCCTTGGCCTCCCA |
| 9448 | CGCCAGCCTTGGCCTCCCAA |
| 9449 | GCCAGCCTTGGCCTCCCAAA |
| 9450 | CCAGCCTTGGCCTCCCAAAG |
| 9451 | CAGCCTTGGCCTCCCAAAGT |
| 9452 | AGCCTTGGCCTCCCAAAGTG |
| 9453 | GCCTTGGCCTCCCAAAGTGC |
| 9454 | CCTTGGCCTCCCAAAGTGCT |
| 9455 | CTTGGCCTCCCAAAGTGCTG |
| 9456 | TTGGCCTCCCAAAGTGCTGG |
| 9457 | TGGCCTCCCAAAGTGCTGGG |
| 9458 | GGCCTCCCAAAGTGCTGGGA |
| 9459 | GCCTCCCAAAGTGCTGGGAT |
| 9460 | CCTCCCAAAGTGCTGGGATT |
| 9461 | CTCCCAAAGTGCTGGGATTA |
| 9462 | TCCCAAAGTGCTGGGATTAC |
| 9463 | CCCAAAGTGCTGGGATTACA |
| 9464 | CCAAAGTGCTGGGATTACAG |
| 9465 | CAAAGTGCTGGGATTACAGG |
| 9466 | AAAGTGCTGGGATTACAGGT |
| 9467 | AAGTGCTGGGATTACAGGTG |
| 9468 | AGTGCTGGGATTACAGGTGT |
| 9469 | GTGCTGGGATTACAGGTGTG |
| 9470 | TGCTGGGATTACAGGTGTGA |
| 9471 | GCTGGGATTACAGGTGTGAA |
| 9472 | CTGGGATTACAGGTGTGAAC |
| 9473 | TGGGATTACAGGTGTGAACC |
| 9474 | GGGATTACAGGTGTGAACCA |
| 9475 | GGATTACAGGTGTGAACCAC |
| 9476 | GATTACAGGTGTGAACCACT |
| 9477 | ATTACAGGTGTGAACCACTG |
| 9478 | TTACAGGTGTGAACCACTGC |
| 9479 | TACAGGTGTGAACCACTGCG |
| 9480 | ACAGGTGTGAACCACTGCGC |
| 9481 | CAGGTGTGAACCACTGCGCC |
| 9482 | AGGTGTGAACCACTGCGCCC |
| 9483 | GGTGTGAACCACTGCGCCCG |
| 9484 | GTGTGAACCACTGCGCCCGG |
| 9485 | TGTGAACCACTGCGCCCGGC |
| 9486 | GTGAACCACTGCGCCCGGCG |
| 9487 | TGAACCACTGCGCCCGGCGG |
| 9488 | GAACCACTGCGCCCGGCGGG |
| 9489 | AACCACTGCGCCCGGCGGGA |
| 9490 | ACCACTGCGCCCGGCGGGAC |
| 9491 | CCACTGCGCCCGGCGGGACT |
| 9492 | CACTGCGCCCGGCGGGACTC |
| 9493 | ACTGCGCCCGGCGGGACTCT |
| 9494 | CTGCGCCCGGCGGGACTCTC |
| 9495 | TGCGCCCGGCGGGACTCTCT |
| 9496 | GCGCCCGGCGGGACTCTCTT |
| 9497 | CGCCCGGCGGGACTCTCTTT |
| 9498 | GCCCGGCGGGACTCTCTTTC |
| 9499 | CCCGGCGGGACTCTCTTTCC |
| 9500 | CCGGCGGGACTCTCTTTCCT |
| 9501 | CGGCGGGACTCTCTTTCCTC |
| 9502 | GGCGGGACTCTCTTTCCTCA |
| 9503 | GCGGGACTCTCTTTCCTCAC |
| 9504 | CGGGACTCTCTTTCCTCACT |
| 9505 | GGGACTCTCTTTCCTCACTT |
| 9506 | GGACTCTCTTTCCTCACTTC |
| 9507 | GACTCTCTTTCCTCACTTCT |
| 9508 | ACTCTCTTTCCTCACTTCTC |
| 9509 | CTCTCTTTCCTCACTTCTCT |
| 9510 | TCTCTTTCCTCACTTCTCTC |
| 9511 | CTCTTTCCTCACTTCTCTCT |
| 9512 | TCTTTCCTCACTTCTCTCTC |
| 9513 | CTTTCCTCACTTCTCTCTCT |
| 9514 | TTTCCTCACTTCTCTCTCTG |
| 9515 | TTCCTCACTTCTCTCTCTGG |
| 9516 | TCCTCACTTCTCTCTCTGGG |
| 9517 | CCTCACTTCTCTCTCTGGGT |
| 9518 | CTCACTTCTCTCTCTGGGTC |
| 9519 | TCACTTCTCTCTCTGGGTCC |
| 9520 | CACTTCTCTCTCTGGGTCCC |
| 9521 | ACTTCTCTCTCTGGGTCCCA |
| 9522 | CTTCTCTCTCTGGGTCCCAG |
| 9523 | TTCTCTCTCTGGGTCCCAGC |
| 9524 | TCTCTCTCTGGGTCCCAGCT |
| 9525 | CTCTCTCTGGGTCCCAGCTT |
| 9526 | TCTCTCTGGGTCCCAGCTTC |
| 9527 | CTCTCTGGGTCCCAGCTTCT |
| 9528 | TCTCTGGGTCCCAGCTTCTG |
| 9529 | CTCTGGGTCCCAGCTTCTGG |
| 9530 | TCTGGGTCCCAGCTTCTGGA |
| 9531 | CTGGGTCCCAGCTTCTGGAA |
| 9532 | TGGGTCCCAGCTTCTGGAAG |
| 9533 | GGGTCCCAGCTTCTGGAAGG |
| 9534 | GGTCCCAGCTTCTGGAAGGA |
| 9535 | GTCCCAGCTTCTGGAAGGAC |
| 9536 | TCCCAGCTTCTGGAAGGACA |
| 9537 | CCCAGCTTCTGGAAGGACAC |
| 9538 | CCAGCTTCTGGAAGGACACC |
| 9539 | CAGCTTCTGGAAGGACACCC |
| 9540 | AGCTTCTGGAAGGACACCCT |
| 9541 | GCTTCTGGAAGGACACCCTG |
| 9542 | CTTCTGGAAGGACACCCTGC |
| 9543 | TTCTGGAAGGACACCCTGCC |
| 9544 | TCTGGAAGGACACCCTGCCT |
| 9545 | CTGGAAGGACACCCTGCCTT |
| 9546 | TGGAAGGACACCCTGCCTTG |
| 9547 | GGAAGGACACCCTGCCTTGC |
| 9548 | GAAGGACACCCTGCCTTGCC |
| 9549 | AAGGACACCCTGCCTTGCCT |
| 9550 | AGGACACCCTGCCTTGCCTC |
| 9551 | GGACACCCTGCCTTGCCTCA |
| 9552 | GACACCCTGCCTTGCCTCAC |
| 9553 | ACACCCTGCCTTGCCTCACC |
| 9554 | CACCCTGCCTTGCCTCACCC |
| 9555 | ACCCTGCCTTGCCTCACCCC |
| 9556 | CCCTGCCTTGCCTCACCCCC |
| 9557 | CCTGCCTTGCCTCACCCCCA |
| 9558 | CTGCCTTGCCTCACCCCCAG |
| 9559 | TGCCTTGCCTCACCCCCAGA |
| 9560 | GCCTTGCCTCACCCCCAGAC |
| 9561 | CCTTGCCTCACCCCCAGACC |
| 9562 | CTTGCCTCACCCCCAGACCA |
| 9563 | TTGCCTCACCCCCAGACCAG |
| 9564 | TGCCTCACCCCCAGACCAGG |
| 9565 | GCCTCACCCCCAGACCAGGC |
| 9566 | CCTCACCCCCAGACCAGGCC |
| 9567 | CTCACCCCCAGACCAGGCCA |
| 9568 | TCACCCCCAGACCAGGCCAG |
| 9569 | CACCCCCAGACCAGGCCAGA |
| 9570 | ACCCCCAGACCAGGCCAGAA |
| 9571 | CCCCCAGACCAGGCCAGAAC |
| 9572 | CCCCAGACCAGGCCAGAACA |
| 9573 | CCCAGACCAGGCCAGAACAC |
| 9574 | CCAGACCAGGCCAGAACACC |
| 9575 | CAGACCAGGCCAGAACACCC |
| 9576 | AGACCAGGCCAGAACACCCC |
| 9577 | GACCAGGCCAGAACACCCCA |
| 9578 | ACCAGGCCAGAACACCCCAA |
| 9579 | CCAGGCCAGAACACCCCAAA |
| 9580 | CAGGCCAGAACACCCCAAAT |
| 9581 | AGGCCAGAACACCCCAAATG |
| 9582 | GGCCAGAACACCCCAAATGG |
| 9583 | GCCAGAACACCCCAAATGGG |
| 9584 | CCAGAACACCCCAAATGGGA |
| 9585 | CAGAACACCCCAAATGGGAA |
| 9586 | AGAACACCCCAAATGGGAAT |
| 9587 | GAACACCCCAAATGGGAATT |
| 9588 | AACACCCCAAATGGGAATTG |
| 9589 | ACACCCCAAATGGGAATTGA |
| 9590 | CACCCCAAATGGGAATTGAG |
| 9591 | ACCCCAAATGGGAATTGAGC |
| 9592 | CCCCAAATGGGAATTGAGCA |
| 9593 | CCCAAATGGGAATTGAGCAA |
| 9594 | CCAAATGGGAATTGAGCAAG |
| 9595 | CAAATGGGAATTGAGCAAGG |
| 9596 | AAATGGGAATTGAGCAAGGA |
| 9597 | AATGGGAATTGAGCAAGGAC |
| 9598 | ATGGGAATTGAGCAAGGACT |
| 9599 | TGGGAATTGAGCAAGGACTT |
| 9600 | GGGAATTGAGCAAGGACTTC |
| 9601 | GGAATTGAGCAAGGACTTCC |
| 9602 | GAATTGAGCAAGGACTTCCC |
| 9603 | AATTGAGCAAGGACTTCCCA |
| 9604 | ATTGAGCAAGGACTTCCCAC |
| 9605 | TTGAGCAAGGACTTCCCACT |
| 9606 | TGAGCAAGGACTTCCCACTC |
| 9607 | GAGCAAGGACTTCCCACTCC |
| 9608 | AGCAAGGACTTCCCACTCCT |
| 9609 | GCAAGGACTTCCCACTCCTG |
| 9610 | CAAGGACTTCCCACTCCTGG |
| 9611 | AAGGACTTCCCACTCCTGGA |
| 9612 | AGGACTTCCCACTCCTGGAC |
| 9613 | GGACTTCCCACTCCTGGACA |
| 9614 | GACTTCCCACTCCTGGACAC |
| 9615 | ACTTCCCACTCCTGGACACT |
| 9616 | CTTCCCACTCCTGGACACTG |
| 9617 | TTCCCACTCCTGGACACTGA |
| 9618 | TCCCACTCCTGGACACTGAG |
| 9619 | CCCACTCCTGGACACTGAGG |
| 9620 | CCACTCCTGGACACTGAGGT |
| 9621 | CACTCCTGGACACTGAGGTC |
| 9622 | ACTCCTGGACACTGAGGTCA |
| 9623 | CTCCTGGACACTGAGGTCAT |
| 9624 | TCCTGGACACTGAGGTCATC |
| 9625 | CCTGGACACTGAGGTCATCT |
| 9626 | CTGGACACTGAGGTCATCTA |
| 9627 | TGGACACTGAGGTCATCTAA |
| 9628 | GGACACTGAGGTCATCTAAT |
| 9629 | GACACTGAGGTCATCTAATG |
| 9630 | ACACTGAGGTCATCTAATGG |
| 9631 | CACTGAGGTCATCTAATGGT |
| 9632 | ACTGAGGTCATCTAATGGTC |
| 9633 | CTGAGGTCATCTAATGGTCT |
| 9634 | TGAGGTCATCTAATGGTCTC |
| 9635 | GAGGTCATCTAATGGTCTCT |
| 9636 | AGGTCATCTAATGGTCTCTC |
| 9637 | GGTCATCTAATGGTCTCTCC |
| 9638 | GTCATCTAATGGTCTCTCCT |
| 9639 | TCATCTAATGGTCTCTCCTC |
| 9640 | CATCTAATGGTCTCTCCTCT |
| 9641 | ATCTAATGGTCTCTCCTCTG |
| 9642 | TCTAATGGTCTCTCCTCTGA |
| 9643 | CTAATGGTCTCTCCTCTGAC |
| 9644 | TAATGGTCTCTCCTCTGACT |
| 9645 | AATGGTCTCTCCTCTGACTC |
| 9646 | ATGGTCTCTCCTCTGACTCA |
| 9647 | TGGTCTCTCCTCTGACTCAA |
| 9648 | GGTCTCTCCTCTGACTCAAT |
| 9649 | GTCTCTCCTCTGACTCAATG |
| 9650 | TCTCTCCTCTGACTCAATGG |
| 9651 | CTCTCCTCTGACTCAATGGA |
| 9652 | TCTCCTCTGACTCAATGGAG |
| 9653 | CTCCTCTGACTCAATGGAGG |
| 9654 | TCCTCTGACTCAATGGAGGC |
| 9655 | CCTCTGACTCAATGGAGGCT |
| 9656 | CTCTGACTCAATGGAGGCTC |
| 9657 | TCTGACTCAATGGAGGCTCC |
| 9658 | CTGACTCAATGGAGGCTCCA |
| 9659 | TGACTCAATGGAGGCTCCAT |
| 9660 | GACTCAATGGAGGCTCCATG |
| 9661 | ACTCAATGGAGGCTCCATGA |
| 9662 | CTCAATGGAGGCTCCATGAG |
| 9663 | TCAATGGAGGCTCCATGAGG |
| 9664 | CAATGGAGGCTCCATGAGGC |
| 9665 | AATGGAGGCTCCATGAGGCT |
| 9666 | ATGGAGGCTCCATGAGGCTG |
| 9667 | TGGAGGCTCCATGAGGCTGG |
| 9668 | GGAGGCTCCATGAGGCTGGG |
| 9669 | GAGGCTCCATGAGGCTGGGG |
| 9670 | AGGCTCCATGAGGCTGGGGA |
| 9671 | GGCTCCATGAGGCTGGGGAC |
| 9672 | GCTCCATGAGGCTGGGGACA |
| 9673 | CTCCATGAGGCTGGGGACAA |
| 9674 | TCCATGAGGCTGGGGACAAG |
| 9675 | CCATGAGGCTGGGGACAAGG |
| 9676 | CATGAGGCTGGGGACAAGGA |
| 9677 | ATGAGGCTGGGGACAAGGAG |
| 9678 | TGAGGCTGGGGACAAGGAGC |
| 9679 | GAGGCTGGGGACAAGGAGCA |
| 9680 | AGGCTGGGGACAAGGAGCAG |
| 9681 | GGCTGGGGACAAGGAGCAGC |
| 9682 | GCTGGGGACAAGGAGCAGCT |
| 9683 | CTGGGGACAAGGAGCAGCTC |
| 9684 | TGGGGACAAGGAGCAGCTCT |
| 9685 | GGGGACAAGGAGCAGCTCTG |
| 9686 | GGGACAAGGAGCAGCTCTGC |
| 9687 | GGACAAGGAGCAGCTCTGCC |
| 9688 | GACAAGGAGCAGCTCTGCCC |
| 9689 | ACAAGGAGCAGCTCTGCCCA |
| 9690 | CAAGGAGCAGCTCTGCCCAC |
| 9691 | AAGGAGCAGCTCTGCCCACA |
| 9692 | AGGAGCAGCTCTGCCCACAG |
| 9693 | GGAGCAGCTCTGCCCACAGC |
| 9694 | GAGCAGCTCTGCCCACAGCC |
| 9695 | AGCAGCTCTGCCCACAGCCT |
| 9696 | GCAGCTCTGCCCACAGCCTG |
| 9697 | CAGCTCTGCCCACAGCCTGG |
| 9698 | AGCTCTGCCCACAGCCTGGC |
| 9699 | GCTCTGCCCACAGCCTGGCA |
| 9700 | CTCTGCCCACAGCCTGGCAC |
| 9701 | TCTGCCCACAGCCTGGCACC |
| 9702 | CTGCCCACAGCCTGGCACCA |
| 9703 | TGCCCACAGCCTGGCACCAG |
| 9704 | GCCCACAGCCTGGCACCAGC |
| 9705 | CCCACAGCCTGGCACCAGCA |
| 9706 | CCACAGCCTGGCACCAGCAT |
| 9707 | CACAGCCTGGCACCAGCATC |
| 9708 | ACAGCCTGGCACCAGCATCC |
| 9709 | CAGCCTGGCACCAGCATCCA |
| 9710 | AGCCTGGCACCAGCATCCAC |
| 9711 | GCCTGGCACCAGCATCCACG |
| 9712 | CCTGGCACCAGCATCCACGC |
| 9713 | CTGGCACCAGCATCCACGCA |
| 9714 | TGGCACCAGCATCCACGCAG |
| 9715 | GGCACCAGCATCCACGCAGG |
| 9716 | GCACCAGCATCCACGCAGGC |
| 9717 | CACCAGCATCCACGCAGGCC |
| 9718 | ACCAGCATCCACGCAGGCCC |
| 9719 | CCAGCATCCACGCAGGCCCC |
| 9720 | CAGCATCCACGCAGGCCCCA |
| 9721 | AGCATCCACGCAGGCCCCAG |
| 9722 | GCATCCACGCAGGCCCCAGC |
| 9723 | CATCCACGCAGGCCCCAGCG |
| 9724 | ATCCACGCAGGCCCCAGCGC |
| 9725 | TCCACGCAGGCCCCAGCGCA |
| 9726 | CCACGCAGGCCCCAGCGCAT |
| 9727 | CACGCAGGCCCCAGCGCATA |
| 9728 | ACGCAGGCCCCAGCGCATAG |
| 9729 | CGCAGGCCCCAGCGCATAGC |
| 9730 | GCAGGCCCCAGCGCATAGCA |
| 9731 | CAGGCCCCAGCGCATAGCAG |
| 9732 | AGGCCCCAGCGCATAGCAGC |
| 9733 | GGCCCCAGCGCATAGCAGCT |
| 9734 | GCCCCAGCGCATAGCAGCTG |
| 9735 | CCCCAGCGCATAGCAGCTGC |
| 9736 | CCCAGCGCATAGCAGCTGCT |
| 9737 | CCAGCGCATAGCAGCTGCTC |
| 9738 | CAGCGCATAGCAGCTGCTCA |
| 9739 | AGCGCATAGCAGCTGCTCAA |
| 9740 | GCGCATAGCAGCTGCTCAAT |
| 9741 | CGCATAGCAGCTGCTCAATA |
| 9742 | GCATAGCAGCTGCTCAATAA |
| 9743 | CATAGCAGCTGCTCAATAAA |
| 9744 | ATAGCAGCTGCTCAATAAAG |
| 9745 | TAGCAGCTGCTCAATAAAGA |
| 9746 | AGCAGCTGCTCAATAAAGAC |
| 9747 | GCAGCTGCTCAATAAAGACT |
| 9748 | CAGCTGCTCAATAAAGACTT |
| 9749 | AGCTGCTCAATAAAGACTTG |
| 9750 | GCTGCTCAATAAAGACTTGA |
| 9751 | CTGCTCAATAAAGACTTGAG |
| 9752 | TGCTCAATAAAGACTTGAGG |
| 9753 | GCTCAATAAAGACTTGAGGA |
| 9754 | CTCAATAAAGACTTGAGGAA |
| 9755 | TCAATAAAGACTTGAGGAAT |
| 9756 | CAATAAAGACTTGAGGAATG |
| 9757 | AATAAAGACTTGAGGAATGG |
| 9758 | ATAAAGACTTGAGGAATGGG |
| 9759 | TAAAGACTTGAGGAATGGGC |
| 9760 | AAAGACTTGAGGAATGGGCC |
| 9761 | AAGACTTGAGGAATGGGCCG |
| 9762 | AGACTTGAGGAATGGGCCGG |
| 9763 | GACTTGAGGAATGGGCCGGG |
| 9764 | ACTTGAGGAATGGGCCGGGC |
| 9765 | CTTGAGGAATGGGCCGGGCG |
| 9766 | TTGAGGAATGGGCCGGGCGC |
| 9767 | TGAGGAATGGGCCGGGCGCA |
| 9768 | GAGGAATGGGCCGGGCGCAG |
| 9769 | AGGAATGGGCCGGGCGCAGT |
| 9770 | GGAATGGGCCGGGCGCAGTG |
| 9771 | GAATGGGCCGGGCGCAGTGG |
| 9772 | AATGGGCCGGGCGCAGTGGT |
| 9773 | ATGGGCCGGGCGCAGTGGTT |
| 9774 | TGGGCCGGGCGCAGTGGTTC |
| 9775 | GGGCCGGGCGCAGTGGTTCA |
| 9776 | GGCCGGGCGCAGTGGTTCAT |
| 9777 | GCCGGGCGCAGTGGTTCATG |
| 9778 | CCGGGCGCAGTGGTTCATGC |
| 9779 | CGGGCGCAGTGGTTCATGCC |
| 9780 | GGGCGCAGTGGTTCATGCCT |
| 9781 | GGCGCAGTGGTTCATGCCTG |
| 9782 | GCGCAGTGGTTCATGCCTGT |
| 9783 | CGCAGTGGTTCATGCCTGTA |
| 9784 | GCAGTGGTTCATGCCTGTAA |
| 9785 | CAGTGGTTCATGCCTGTAAT |
| 9786 | AGTGGTTCATGCCTGTAATC |
| 9787 | GTGGTTCATGCCTGTAATCC |
| 9788 | TGGTTCATGCCTGTAATCCA |
| 9789 | GGTTCATGCCTGTAATCCAG |
| 9790 | GTTCATGCCTGTAATCCAGC |
| 9791 | TTCATGCCTGTAATCCAGCA |
| 9792 | TCATGCCTGTAATCCAGCAC |
| 9793 | CATGCCTGTAATCCAGCACT |
| 9794 | ATGCCTGTAATCCAGCACTT |
| 9795 | TGCCTGTAATCCAGCACTTT |
| 9796 | GCCTGTAATCCAGCACTTTG |
| 9797 | CCTGTAATCCAGCACTTTGG |
| 9798 | CTGTAATCCAGCACTTTGGG |
| 9799 | TGTAATCCAGCACTTTGGGA |
| 9800 | GTAATCCAGCACTTTGGGAG |
| 9801 | TAATCCAGCACTTTGGGAGG |
| 9802 | AATCCAGCACTTTGGGAGGC |
| 9803 | ATCCAGCACTTTGGGAGGCG |
| 9804 | TCCAGCACTTTGGGAGGCGG |
| 9805 | CCAGCACTTTGGGAGGCGGG |
| 9806 | CAGCACTTTGGGAGGCGGGC |
| 9807 | AGCACTTTGGGAGGCGGGCG |
| 9808 | GCACTTTGGGAGGCGGGCGG |
| 9809 | CACTTTGGGAGGCGGGCGGA |
| 9810 | ACTTTGGGAGGCGGGCGGAT |
| 9811 | CTTTGGGAGGCGGGCGGATC |
| 9812 | TTTGGGAGGCGGGCGGATCG |
| 9813 | TTGGGAGGCGGGCGGATCGG |
| 9814 | TGGGAGGCGGGCGGATCGGT |
| 9815 | GGGAGGCGGGCGGATCGGTC |
| 9816 | GGAGGCGGGCGGATCGGTCA |
| 9817 | GAGGCGGGCGGATCGGTCAG |
| 9818 | AGGCGGGCGGATCGGTCAGG |
| 9819 | GGCGGGCGGATCGGTCAGGA |
| 9820 | GCGGGCGGATCGGTCAGGAG |
| 9821 | CGGGCGGATCGGTCAGGAGT |
| 9822 | GGGCGGATCGGTCAGGAGTT |
| 9823 | GGCGGATCGGTCAGGAGTTT |
| 9824 | GCGGATCGGTCAGGAGTTTG |
| 9825 | CGGATCGGTCAGGAGTTTGA |
| 9826 | GGATCGGTCAGGAGTTTGAG |
| 9827 | GATCGGTCAGGAGTTTGAGA |
| 9828 | ATCGGTCAGGAGTTTGAGAC |
| 9829 | TCGGTCAGGAGTTTGAGACC |
| 9830 | CGGTCAGGAGTTTGAGACCA |
| 9831 | GGTCAGGAGTTTGAGACCAG |
| 9832 | GTCAGGAGTTTGAGACCAGC |
| 9833 | TCAGGAGTTTGAGACCAGCC |
| 9834 | CAGGAGTTTGAGACCAGCCT |
| 9835 | AGGAGTTTGAGACCAGCCTG |
| 9836 | GGAGTTTGAGACCAGCCTGG |
| 9837 | GAGTTTGAGACCAGCCTGGT |
| 9838 | AGTTTGAGACCAGCCTGGTC |
| 9839 | GTTTGAGACCAGCCTGGTCA |
| 9840 | TTTGAGACCAGCCTGGTCAA |
| 9841 | TTGAGACCAGCCTGGTCAAC |
| 9842 | TGAGACCAGCCTGGTCAACA |
| 9843 | GAGACCAGCCTGGTCAACAT |
| 9844 | AGACCAGCCTGGTCAACATG |
| 9845 | GACCAGCCTGGTCAACATGG |
| 9846 | ACCAGCCTGGTCAACATGGC |
| 9847 | CCAGCCTGGTCAACATGGCC |
| 9848 | CAGCCTGGTCAACATGGCCA |
| 9849 | AGCCTGGTCAACATGGCCAA |
| 9850 | GCCTGGTCAACATGGCCAAA |
| 9851 | CCTGGTCAACATGGCCAAAC |
| 9852 | CTGGTCAACATGGCCAAACC |
| 9853 | TGGTCAACATGGCCAAACCC |
| 9854 | GGTCAACATGGCCAAACCCC |
| 9855 | GTCAACATGGCCAAACCCCA |
| 9856 | TCAACATGGCCAAACCCCAT |
| 9857 | CAACATGGCCAAACCCCATC |
| 9858 | AACATGGCCAAACCCCATCT |
| 9859 | ACATGGCCAAACCCCATCTC |
| 9860 | CATGGCCAAACCCCATCTCT |
| 9861 | ATGGCCAAACCCCATCTCTA |
| 9862 | TGGCCAAACCCCATCTCTAG |
| 9863 | GGCCAAACCCCATCTCTAGT |
| 9864 | GCCAAACCCCATCTCTAGTA |
| 9865 | CCAAACCCCATCTCTAGTAA |
| 9866 | CAAACCCCATCTCTAGTAAA |
| 9867 | AAACCCCATCTCTAGTAAAA |
| 9868 | AACCCCATCTCTAGTAAAAC |
| 9869 | ACCCCATCTCTAGTAAAACA |
| 9870 | CCCCATCTCTAGTAAAACAT |
| 9871 | CCCATCTCTAGTAAAACATA |
| 9872 | CCATCTCTAGTAAAACATAC |
| 9873 | CATCTCTAGTAAAACATACA |
| 9874 | ATCTCTAGTAAAACATACAA |
| 9875 | TCTCTAGTAAAACATACAAA |
| 9876 | CTCTAGTAAAACATACAAAG |
| 9877 | TCTAGTAAAACATACAAAGA |
| 9878 | CTAGTAAAACATACAAAGAT |
| 9879 | TAGTAAAACATACAAAGATT |
| 9880 | AGTAAAACATACAAAGATTA |
| 9881 | GTAAAACATACAAAGATTAG |
| 9882 | TAAAACATACAAAGATTAGC |
| 9883 | AAAACATACAAAGATTAGCT |
| 9884 | AAACATACAAAGATTAGCTG |
| 9885 | AACATACAAAGATTAGCTGG |
| 9886 | ACATACAAAGATTAGCTGGG |
| 9887 | CATACAAAGATTAGCTGGGT |
| 9888 | ATACAAAGATTAGCTGGGTG |
| 9889 | TACAAAGATTAGCTGGGTGT |
| 9890 | ACAAAGATTAGCTGGGTGTG |
| 9891 | CAAAGATTAGCTGGGTGTGA |
| 9892 | AAAGATTAGCTGGGTGTGAT |
| 9893 | AAGATTAGCTGGGTGTGATG |
| 9894 | AGATTAGCTGGGTGTGATGG |
| 9895 | GATTAGCTGGGTGTGATGGT |
| 9896 | ATTAGCTGGGTGTGATGGTG |
| 9897 | TTAGCTGGGTGTGATGGTGG |
| 9898 | TAGCTGGGTGTGATGGTGGA |
| 9899 | AGCTGGGTGTGATGGTGGAC |
| 9900 | GCTGGGTGTGATGGTGGACG |
| 9901 | CTGGGTGTGATGGTGGACGC |
| 9902 | TGGGTGTGATGGTGGACGCC |
| 9903 | GGGTGTGATGGTGGACGCCA |
| 9904 | GGTGTGATGGTGGACGCCAG |
| 9905 | GTGTGATGGTGGACGCCAGT |
| 9906 | TGTGATGGTGGACGCCAGTA |
| 9907 | GTGATGGTGGACGCCAGTAA |
| 9908 | TGATGGTGGACGCCAGTAAT |
| 9909 | GATGGTGGACGCCAGTAATC |
| 9910 | ATGGTGGACGCCAGTAATCC |
| 9911 | TGGTGGACGCCAGTAATCCC |
| 9912 | GGTGGACGCCAGTAATCCCA |
| 9913 | GTGGACGCCAGTAATCCCAG |
| 9914 | TGGACGCCAGTAATCCCAGC |
| 9915 | GGACGCCAGTAATCCCAGCT |
| 9916 | GACGCCAGTAATCCCAGCTC |
| 9917 | ACGCCAGTAATCCCAGCTCC |
| 9918 | CGCCAGTAATCCCAGCTCCT |
| 9919 | GCCAGTAATCCCAGCTCCTT |
| 9920 | CCAGTAATCCCAGCTCCTTA |
| 9921 | CAGTAATCCCAGCTCCTTAG |
| 9922 | AGTAATCCCAGCTCCTTAGG |
| 9923 | GTAATCCCAGCTCCTTAGGA |
| 9924 | TAATCCCAGCTCCTTAGGAG |
| 9925 | AATCCCAGCTCCTTAGGAGG |
| 9926 | ATCCCAGCTCCTTAGGAGGC |
| 9927 | TCCCAGCTCCTTAGGAGGCA |
| 9928 | CCCAGCTCCTTAGGAGGCAG |
| 9929 | CCAGCTCCTTAGGAGGCAGA |
| 9930 | CAGCTCCTTAGGAGGCAGAG |
| 9931 | AGCTCCTTAGGAGGCAGAGG |
| 9932 | GCTCCTTAGGAGGCAGAGGC |
| 9933 | CTCCTTAGGAGGCAGAGGCA |
| 9934 | TCCTTAGGAGGCAGAGGCAG |
| 9935 | CCTTAGGAGGCAGAGGCAGG |
| 9936 | CTTAGGAGGCAGAGGCAGGA |
| 9937 | TTAGGAGGCAGAGGCAGGAG |
| 9938 | TAGGAGGCAGAGGCAGGAGA |
| 9939 | AGGAGGCAGAGGCAGGAGAA |
| 9940 | GGAGGCAGAGGCAGGAGAAT |
| 9941 | GAGGCAGAGGCAGGAGAATC |
| 9942 | AGGCAGAGGCAGGAGAATCA |
| 9943 | GGCAGAGGCAGGAGAATCAC |
| 9944 | GCAGAGGCAGGAGAATCACT |
| 9945 | CAGAGGCAGGAGAATCACTT |
| 9946 | AGAGGCAGGAGAATCACTTG |
| 9947 | GAGGCAGGAGAATCACTTGA |
| 9948 | AGGCAGGAGAATCACTTGAA |
| 9949 | GGCAGGAGAATCACTTGAAC |
| 9950 | GCAGGAGAATCACTTGAACC |
| 9951 | CAGGAGAATCACTTGAACCC |
| 9952 | AGGAGAATCACTTGAACCCG |
| 9953 | GGAGAATCACTTGAACCCGG |
| 9954 | GAGAATCACTTGAACCCGGG |
| 9955 | AGAATCACTTGAACCCGGGA |
| 9956 | GAATCACTTGAACCCGGGAG |
| 9957 | AATCACTTGAACCCGGGAGG |
| 9958 | ATCACTTGAACCCGGGAGGC |
| 9959 | TCACTTGAACCCGGGAGGCA |
| 9960 | CACTTGAACCCGGGAGGCAG |
| 9961 | ACTTGAACCCGGGAGGCAGA |
| 9962 | CTTGAACCCGGGAGGCAGAG |
| 9963 | TTGAACCCGGGAGGCAGAGG |
| 9964 | TGAACCCGGGAGGCAGAGGT |
| 9965 | GAACCCGGGAGGCAGAGGTT |
| 9966 | AACCCGGGAGGCAGAGGTTG |
| 9967 | ACCCGGGAGGCAGAGGTTGC |
| 9968 | CCCGGGAGGCAGAGGTTGCA |
| 9969 | CCGGGAGGCAGAGGTTGCAG |
| 9970 | CGGGAGGCAGAGGTTGCAGT |
| 9971 | GGGAGGCAGAGGTTGCAGTC |
| 9972 | GGAGGCAGAGGTTGCAGTCA |
| 9973 | GAGGCAGAGGTTGCAGTCAG |
| 9974 | AGGCAGAGGTTGCAGTCAGC |
| 9975 | GGCAGAGGTTGCAGTCAGCT |
| 9976 | GCAGAGGTTGCAGTCAGCTG |
| 9977 | CAGAGGTTGCAGTCAGCTGA |
| 9978 | AGAGGTTGCAGTCAGCTGAG |
| 9979 | GAGGTTGCAGTCAGCTGAGG |
| 9980 | AGGTTGCAGTCAGCTGAGGT |
| 9981 | GGTTGCAGTCAGCTGAGGTT |
| 9982 | GTTGCAGTCAGCTGAGGTTG |
| 9983 | TTGCAGTCAGCTGAGGTTGA |
| 9984 | TGCAGTCAGCTGAGGTTGAA |
| 9985 | GCAGTCAGCTGAGGTTGAAC |
| 9986 | CAGTCAGCTGAGGTTGAACC |
| 9987 | AGTCAGCTGAGGTTGAACCA |
| 9988 | GTCAGCTGAGGTTGAACCAT |
| 9989 | TCAGCTGAGGTTGAACCATT |
| 9990 | CAGCTGAGGTTGAACCATTG |
| 9991 | AGCTGAGGTTGAACCATTGC |
| 9992 | GCTGAGGTTGAACCATTGCA |
| 9993 | CTGAGGTTGAACCATTGCAC |
| 9994 | TGAGGTTGAACCATTGCACT |
| 9995 | GAGGTTGAACCATTGCACTC |
| 9996 | AGGTTGAACCATTGCACTCC |
| 9997 | GGTTGAACCATTGCACTCCA |
| 9998 | GTTGAACCATTGCACTCCAA |
| 9999 | TTGAACCATTGCACTCCAAC |
| 10000 | TGAACCATTGCACTCCAACC |
| 10001 | GAACCATTGCACTCCAACCT |
| 10002 | AACCATTGCACTCCAACCTG |
| 10003 | ACCATTGCACTCCAACCTGG |
| 10004 | CCATTGCACTCCAACCTGGG |
| 10005 | CATTGCACTCCAACCTGGGT |
| 10006 | ATTGCACTCCAACCTGGGTG |
| 10007 | TTGCACTCCAACCTGGGTGA |
| 10008 | TGCACTCCAACCTGGGTGAC |
| 10009 | GCACTCCAACCTGGGTGACA |
| 10010 | CACTCCAACCTGGGTGACAG |
| 10011 | ACTCCAACCTGGGTGACAGA |
| 10012 | CTCCAACCTGGGTGACAGAG |
| 10013 | TCCAACCTGGGTGACAGAGT |
| 10014 | CCAACCTGGGTGACAGAGTG |
| 10015 | CAACCTGGGTGACAGAGTGA |
| 10016 | AACCTGGGTGACAGAGTGAG |
| 10017 | ACCTGGGTGACAGAGTGAGA |
| 10018 | CCTGGGTGACAGAGTGAGAC |
| 10019 | CTGGGTGACAGAGTGAGACT |
| 10020 | TGGGTGACAGAGTGAGACTC |
| 10021 | GGGTGACAGAGTGAGACTCT |
| 10022 | GGTGACAGAGTGAGACTCTG |
| 10023 | GTGACAGAGTGAGACTCTGT |
| 10024 | TGACAGAGTGAGACTCTGTC |
| 10025 | GACAGAGTGAGACTCTGTCT |
| 10026 | ACAGAGTGAGACTCTGTCTC |
| 10027 | CAGAGTGAGACTCTGTCTCA |
| 10028 | AGAGTGAGACTCTGTCTCAA |
| 10029 | GAGTGAGACTCTGTCTCAAA |
| 10030 | AGTGAGACTCTGTCTCAAAA |
| 10031 | GTGAGACTCTGTCTCAAAAA |
| 10032 | TGAGACTCTGTCTCAAAAAA |
| 10033 | GAGACTCTGTCTCAAAAAAA |
| 10034 | AGACTCTGTCTCAAAAAAAA |
| 10035 | GACTCTGTCTCAAAAAAAAA |
| 10036 | ACTCTGTCTCAAAAAAAAAA |
| 10037 | CTCTGTCTCAAAAAAAAAAA |
| 10038 | TCTGTCTCAAAAAAAAAAAA |
| 10039 | CTGTCTCAAAAAAAAAAAAG |
| 10040 | TGTCTCAAAAAAAAAAAAGA |
| 10041 | GTCTCAAAAAAAAAAAAGAC |
| 10042 | TCTCAAAAAAAAAAAAGACT |
| 10043 | CTCAAAAAAAAAAAAGACTT |
| 10044 | TCAAAAAAAAAAAAGACTTG |
| 10045 | CAAAAAAAAAAAAGACTTGA |
| 10046 | AAAAAAAAAAAAGACTTGAT |
| 10047 | AAAAAAAAAAAGACTTGATA |
| 10048 | AAAAAAAAAAGACTTGATAA |
| 10049 | AAAAAAAAAGACTTGATAAA |
| 10050 | AAAAAAAAGACTTGATAAAT |
| 10051 | AAAAAAAGACTTGATAAATG |
| 10052 | AAAAAAGACTTGATAAATGA |
| 10053 | AAAAAGACTTGATAAATGAA |
| 10054 | AAAAGACTTGATAAATGAAT |
| 10055 | AAAGACTTGATAAATGAATA |
| 10056 | AAGACTTGATAAATGAATAA |
| 10057 | AGACTTGATAAATGAATAAA |
| 10058 | GACTTGATAAATGAATAAAA |
| 10059 | ACTTGATAAATGAATAAAAA |
| 10060 | CTTGATAAATGAATAAAAAT |
| 10061 | TTGATAAATGAATAAAAATT |
| 10062 | TGATAAATGAATAAAAATTA |
| 10063 | GATAAATGAATAAAAATTAG |
| 10064 | ATAAATGAATAAAAATTAGC |
| 10065 | TAAATGAATAAAAATTAGCT |
| 10066 | AAATGAATAAAAATTAGCTG |
| 10067 | AATGAATAAAAATTAGCTGG |
| 10068 | ATGAATAAAAATTAGCTGGG |
| 10069 | TGAATAAAAATTAGCTGGGC |
| 10070 | GAATAAAAATTAGCTGGGCG |
| 10071 | AATAAAAATTAGCTGGGCGT |
| 10072 | ATAAAAATTAGCTGGGCGTG |
| 10073 | TAAAAATTAGCTGGGCGTGG |
| 10074 | AAAAATTAGCTGGGCGTGGT |
| 10075 | AAAATTAGCTGGGCGTGGTG |
| 10076 | AAATTAGCTGGGCGTGGTGG |
| 10077 | AATTAGCTGGGCGTGGTGGC |
| 10078 | ATTAGCTGGGCGTGGTGGCG |
| 10079 | TTAGCTGGGCGTGGTGGCGG |
| 10080 | TAGCTGGGCGTGGTGGCGGT |
| 10081 | AGCTGGGCGTGGTGGCGGTA |
| 10082 | GCTGGGCGTGGTGGCGGTAG |
| 10083 | CTGGGCGTGGTGGCGGTAGG |
| 10084 | TGGGCGTGGTGGCGGTAGGC |
| 10085 | GGGCGTGGTGGCGGTAGGCG |
| 10086 | GGCGTGGTGGCGGTAGGCGC |
| 10087 | GCGTGGTGGCGGTAGGCGCC |
| 10088 | CGTGGTGGCGGTAGGCGCCT |
| 10089 | GTGGTGGCGGTAGGCGCCTA |
| 10090 | TGGTGGCGGTAGGCGCCTAT |
| 10091 | GGTGGCGGTAGGCGCCTATA |
| 10092 | GTGGCGGTAGGCGCCTATAA |
| 10093 | TGGCGGTAGGCGCCTATAAT |
| 10094 | GGCGGTAGGCGCCTATAATC |
| 10095 | GCGGTAGGCGCCTATAATCC |
| 10096 | CGGTAGGCGCCTATAATCCC |
| 10097 | GGTAGGCGCCTATAATCCCA |
| 10098 | GTAGGCGCCTATAATCCCAT |
| 10099 | TAGGCGCCTATAATCCCATC |
| 10100 | AGGCGCCTATAATCCCATCT |
| 10101 | GGCGCCTATAATCCCATCTA |
| 10102 | GCGCCTATAATCCCATCTAC |
| 10103 | CGCCTATAATCCCATCTACT |
| 10104 | GCCTATAATCCCATCTACTT |
| 10105 | CCTATAATCCCATCTACTTG |
| 10106 | CTATAATCCCATCTACTTGA |
| 10107 | TATAATCCCATCTACTTGAG |
| 10108 | ATAATCCCATCTACTTGAGA |
| 10109 | TAATCCCATCTACTTGAGAG |
| 10110 | AATCCCATCTACTTGAGAGG |
| 10111 | ATCCCATCTACTTGAGAGGC |
| 10112 | TCCCATCTACTTGAGAGGCT |
| 10113 | CCCATCTACTTGAGAGGCTG |
| 10114 | CCATCTACTTGAGAGGCTGA |
| 10115 | CATCTACTTGAGAGGCTGAG |
| 10116 | ATCTACTTGAGAGGCTGAGG |
| 10117 | TCTACTTGAGAGGCTGAGGC |
| 10118 | CTACTTGAGAGGCTGAGGCA |
| 10119 | TACTTGAGAGGCTGAGGCAG |
| 10120 | ACTTGAGAGGCTGAGGCAGG |
| 10121 | CTTGAGAGGCTGAGGCAGGA |
| 10122 | TTGAGAGGCTGAGGCAGGAG |
| 10123 | TGAGAGGCTGAGGCAGGAGA |
| 10124 | GAGAGGCTGAGGCAGGAGAA |
| 10125 | AGAGGCTGAGGCAGGAGAAT |
| 10126 | GAGGCTGAGGCAGGAGAATC |
| 10127 | AGGCTGAGGCAGGAGAATCA |
| 10128 | GGCTGAGGCAGGAGAATCAC |
| 10129 | GCTGAGGCAGGAGAATCACT |
| 10130 | CTGAGGCAGGAGAATCACTT |
| 10131 | TGAGGCAGGAGAATCACTTG |
| 10132 | GAGGCAGGAGAATCACTTGA |
| 10133 | AGGCAGGAGAATCACTTGAA |
| 10134 | GGCAGGAGAATCACTTGAAC |
| 10135 | GCAGGAGAATCACTTGAACC |
| 10136 | CAGGAGAATCACTTGAACCC |
| 10137 | AGGAGAATCACTTGAACCCA |
| 10138 | GGAGAATCACTTGAACCCAG |
| 10139 | GAGAATCACTTGAACCCAGT |
| 10140 | AGAATCACTTGAACCCAGTG |
| 10141 | GAATCACTTGAACCCAGTGG |
| 10142 | AATCACTTGAACCCAGTGGG |
| 10143 | ATCACTTGAACCCAGTGGGA |
| 10144 | TCACTTGAACCCAGTGGGAG |
| 10145 | CACTTGAACCCAGTGGGAGG |
| 10146 | ACTTGAACCCAGTGGGAGGC |
| 10147 | CTTGAACCCAGTGGGAGGCA |
| 10148 | TTGAACCCAGTGGGAGGCAG |
| 10149 | TGAACCCAGTGGGAGGCAGA |
| 10150 | GAACCCAGTGGGAGGCAGAG |
| 10151 | AACCCAGTGGGAGGCAGAGG |
| 10152 | ACCCAGTGGGAGGCAGAGGT |
| 10153 | CCCAGTGGGAGGCAGAGGTT |
| 10154 | CCAGTGGGAGGCAGAGGTTG |
| 10155 | CAGTGGGAGGCAGAGGTTGC |
| 10156 | AGTGGGAGGCAGAGGTTGCA |
| 10157 | GTGGGAGGCAGAGGTTGCAG |
| 10158 | TGGGAGGCAGAGGTTGCAGT |
| 10159 | GGGAGGCAGAGGTTGCAGTG |
| 10160 | GGAGGCAGAGGTTGCAGTGA |
| 10161 | GAGGCAGAGGTTGCAGTGAG |
| 10162 | AGGCAGAGGTTGCAGTGAGC |
| 10163 | GGCAGAGGTTGCAGTGAGCT |
| 10164 | GCAGAGGTTGCAGTGAGCTG |
| 10165 | CAGAGGTTGCAGTGAGCTGA |
| 10166 | AGAGGTTGCAGTGAGCTGAG |
| 10167 | GAGGTTGCAGTGAGCTGAGA |
| 10168 | AGGTTGCAGTGAGCTGAGAT |
| 10169 | GGTTGCAGTGAGCTGAGATT |
| 10170 | GTTGCAGTGAGCTGAGATTG |
| 10171 | TTGCAGTGAGCTGAGATTGC |
| 10172 | TGCAGTGAGCTGAGATTGCG |
| 10173 | GCAGTGAGCTGAGATTGCGC |
| 10174 | CAGTGAGCTGAGATTGCGCC |
| 10175 | AGTGAGCTGAGATTGCGCCA |
| 10176 | GTGAGCTGAGATTGCGCCAC |
| 10177 | TGAGCTGAGATTGCGCCACT |
| 10178 | GAGCTGAGATTGCGCCACTG |
| 10179 | AGCTGAGATTGCGCCACTGC |
| 10180 | GCTGAGATTGCGCCACTGCA |
| 10181 | CTGAGATTGCGCCACTGCAC |
| 10182 | TGAGATTGCGCCACTGCACT |
| 10183 | GAGATTGCGCCACTGCACTC |
| 10184 | AGATTGCGCCACTGCACTCC |
| 10185 | GATTGCGCCACTGCACTCCA |
| 10186 | ATTGCGCCACTGCACTCCAG |
| 10187 | TTGCGCCACTGCACTCCAGC |
| 10188 | TGCGCCACTGCACTCCAGCC |
| 10189 | GCGCCACTGCACTCCAGCCT |
| 10190 | CGCCACTGCACTCCAGCCTG |
| 10191 | GCCACTGCACTCCAGCCTGG |
| 10192 | CCACTGCACTCCAGCCTGGA |
| 10193 | CACTGCACTCCAGCCTGGAC |
| 10194 | ACTGCACTCCAGCCTGGACA |
| 10195 | CTGCACTCCAGCCTGGACAA |
| 10196 | TGCACTCCAGCCTGGACAAC |
| 10197 | GCACTCCAGCCTGGACAACA |
| 10198 | CACTCCAGCCTGGACAACAG |
| 10199 | ACTCCAGCCTGGACAACAGA |
| 10200 | CTCCAGCCTGGACAACAGAG |
| 10201 | TCCAGCCTGGACAACAGAGC |
| 10202 | CCAGCCTGGACAACAGAGCG |
| 10203 | CAGCCTGGACAACAGAGCGA |
| 10204 | AGCCTGGACAACAGAGCGAG |
| 10205 | GCCTGGACAACAGAGCGAGA |
| 10206 | CCTGGACAACAGAGCGAGAC |
| 10207 | CTGGACAACAGAGCGAGACT |
| 10208 | TGGACAACAGAGCGAGACTC |
| 10209 | GGACAACAGAGCGAGACTCC |
| 10210 | GACAACAGAGCGAGACTCCG |
| 10211 | ACAACAGAGCGAGACTCCGT |
| 10212 | CAACAGAGCGAGACTCCGTC |
| 10213 | AACAGAGCGAGACTCCGTCT |
| 10214 | ACAGAGCGAGACTCCGTCTC |
| 10215 | CAGAGCGAGACTCCGTCTCA |
| 10216 | AGAGCGAGACTCCGTCTCAA |
| 10217 | GAGCGAGACTCCGTCTCAAA |
| 10218 | AGCGAGACTCCGTCTCAAAA |
| 10219 | GCGAGACTCCGTCTCAAAAA |
| 10220 | CGAGACTCCGTCTCAAAAAG |
| 10221 | GAGACTCCGTCTCAAAAAGC |
| 10222 | AGACTCCGTCTCAAAAAGCA |
| 10223 | GACTCCGTCTCAAAAAGCAA |
| 10224 | ACTCCGTCTCAAAAAGCAAA |
| 10225 | CTCCGTCTCAAAAAGCAAAC |
| 10226 | TCCGTCTCAAAAAGCAAACA |
| 10227 | CCGTCTCAAAAAGCAAACAA |
| 10228 | CGTCTCAAAAAGCAAACAAA |
| 10229 | GTCTCAAAAAGCAAACAAAA |
| 10230 | TCTCAAAAAGCAAACAAAAC |
| 10231 | CTCAAAAAGCAAACAAAACA |
| 10232 | TCAAAAAGCAAACAAAACAG |
| 10233 | CAAAAAGCAAACAAAACAGT |
| 10234 | AAAAAGCAAACAAAACAGTC |
| 10235 | AAAAGCAAACAAAACAGTCT |
| 10236 | AAAGCAAACAAAACAGTCTT |
| 10237 | AAGCAAACAAAACAGTCTTG |
| 10238 | AGCAAACAAAACAGTCTTGA |
| 10239 | GCAAACAAAACAGTCTTGAC |
| 10240 | CAAACAAAACAGTCTTGACA |
| 10241 | AAACAAAACAGTCTTGACAA |
| 10242 | AACAAAACAGTCTTGACAAA |
| 10243 | ACAAAACAGTCTTGACAAAT |
| 10244 | CAAAACAGTCTTGACAAATG |
| 10245 | AAAACAGTCTTGACAAATGA |
| 10246 | AAACAGTCTTGACAAATGAA |
| 10247 | AACAGTCTTGACAAATGAAT |
| 10248 | ACAGTCTTGACAAATGAATG |
| 10249 | CAGTCTTGACAAATGAATGA |
| 10250 | AGTCTTGACAAATGAATGAA |
| 10251 | GTCTTGACAAATGAATGAAT |
| 10252 | TCTTGACAAATGAATGAATG |
| 10253 | CTTGACAAATGAATGAATGA |
| 10254 | TTGACAAATGAATGAATGAA |
| 10255 | TGACAAATGAATGAATGAAT |
| 10256 | GACAAATGAATGAATGAATG |
| 10257 | ACAAATGAATGAATGAATGA |
| 10258 | CAAATGAATGAATGAATGAA |
| 10259 | AAATGAATGAATGAATGAAT |
| 10260 | AATGAATGAATGAATGAATG |
| 10261 | ATGAATGAATGAATGAATGA |
| 10262 | TGAATGAATGAATGAATGAA |
| 10263 | GAATGAATGAATGAATGAAT |
| 10264 | AATGAATGAATGAATGAATG |
| 10265 | ATGAATGAATGAATGAATGA |
| 10266 | TGAATGAATGAATGAATGAG |
| 10267 | GAATGAATGAATGAATGAGG |
| 10268 | AATGAATGAATGAATGAGGC |
| 10269 | ATGAATGAATGAATGAGGCA |
| 10270 | TGAATGAATGAATGAGGCAG |
| 10271 | GAATGAATGAATGAGGCAGC |
| 10272 | AATGAATGAATGAGGCAGCA |
| 10273 | ATGAATGAATGAGGCAGCAG |
| 10274 | TGAATGAATGAGGCAGCAGG |
| 10275 | GAATGAATGAGGCAGCAGGT |
| 10276 | AATGAATGAGGCAGCAGGTC |
| 10277 | ATGAATGAGGCAGCAGGTCC |
| 10278 | TGAATGAGGCAGCAGGTCCA |
| 10279 | GAATGAGGCAGCAGGTCCAG |
| 10280 | AATGAGGCAGCAGGTCCAGA |
| 10281 | ATGAGGCAGCAGGTCCAGAA |
| 10282 | TGAGGCAGCAGGTCCAGAAC |
| 10283 | GAGGCAGCAGGTCCAGAACG |
| 10284 | AGGCAGCAGGTCCAGAACGG |
| 10285 | GGCAGCAGGTCCAGAACGGG |
| 10286 | GCAGCAGGTCCAGAACGGGA |
| 10287 | CAGCAGGTCCAGAACGGGAA |
| 10288 | AGCAGGTCCAGAACGGGAAG |
| 10289 | GCAGGTCCAGAACGGGAAGA |
| 10290 | CAGGTCCAGAACGGGAAGAA |
| 10291 | AGGTCCAGAACGGGAAGAAC |
| 10292 | GGTCCAGAACGGGAAGAACT |
| 10293 | GTCCAGAACGGGAAGAACTG |
| 10294 | TCCAGAACGGGAAGAACTGT |
| 10295 | CCAGAACGGGAAGAACTGTG |
| 10296 | CAGAACGGGAAGAACTGTGC |
| 10297 | AGAACGGGAAGAACTGTGCT |
| 10298 | GAACGGGAAGAACTGTGCTG |
| 10299 | AACGGGAAGAACTGTGCTGA |
| 10300 | ACGGGAAGAACTGTGCTGAG |
| 10301 | CGGGAAGAACTGTGCTGAGC |
| 10302 | GGGAAGAACTGTGCTGAGCA |
| 10303 | GGAAGAACTGTGCTGAGCAG |
| 10304 | GAAGAACTGTGCTGAGCAGG |
| 10305 | AAGAACTGTGCTGAGCAGGA |
| 10306 | AGAACTGTGCTGAGCAGGAG |
| 10307 | GAACTGTGCTGAGCAGGAGC |
| 10308 | AACTGTGCTGAGCAGGAGCA |
| 10309 | ACTGTGCTGAGCAGGAGCAT |
| 10310 | CTGTGCTGAGCAGGAGCATC |
| 10311 | TGTGCTGAGCAGGAGCATCT |
| 10312 | GTGCTGAGCAGGAGCATCTC |
| 10313 | TGCTGAGCAGGAGCATCTCA |
| 10314 | GCTGAGCAGGAGCATCTCAG |
| 10315 | CTGAGCAGGAGCATCTCAGA |
| 10316 | TGAGCAGGAGCATCTCAGAG |
| 10317 | GAGCAGGAGCATCTCAGAGG |
| 10318 | AGCAGGAGCATCTCAGAGGC |
| 10319 | GCAGGAGCATCTCAGAGGCT |
| 10320 | CAGGAGCATCTCAGAGGCTC |
| 10321 | AGGAGCATCTCAGAGGCTCT |
| 10322 | GGAGCATCTCAGAGGCTCTG |
| 10323 | GAGCATCTCAGAGGCTCTGC |
| 10324 | AGCATCTCAGAGGCTCTGCC |
| 10325 | GCATCTCAGAGGCTCTGCCT |
| 10326 | CATCTCAGAGGCTCTGCCTG |
| 10327 | ATCTCAGAGGCTCTGCCTGG |
| 10328 | TCTCAGAGGCTCTGCCTGGG |
| 10329 | CTCAGAGGCTCTGCCTGGGG |
| 10330 | TCAGAGGCTCTGCCTGGGGT |
| 10331 | CAGAGGCTCTGCCTGGGGTC |
| 10332 | AGAGGCTCTGCCTGGGGTCC |
| 10333 | GAGGCTCTGCCTGGGGTCCC |
| 10334 | AGGCTCTGCCTGGGGTCCCA |
| 10335 | GGCTCTGCCTGGGGTCCCAG |
| 10336 | GCTCTGCCTGGGGTCCCAGC |
| 10337 | CTCTGCCTGGGGTCCCAGCT |
| 10338 | TCTGCCTGGGGTCCCAGCTC |
| 10339 | CTGCCTGGGGTCCCAGCTCC |
| 10340 | TGCCTGGGGTCCCAGCTCCT |
| 10341 | GCCTGGGGTCCCAGCTCCTA |
| 10342 | CCTGGGGTCCCAGCTCCTAG |
| 10343 | CTGGGGTCCCAGCTCCTAGA |
| 10344 | TGGGGTCCCAGCTCCTAGAG |
| 10345 | GGGGTCCCAGCTCCTAGAGG |
| 10346 | GGGTCCCAGCTCCTAGAGGG |
| 10347 | GGTCCCAGCTCCTAGAGGGA |
| 10348 | GTCCCAGCTCCTAGAGGGAG |
| 10349 | TCCCAGCTCCTAGAGGGAGA |
| 10350 | CCCAGCTCCTAGAGGGAGAG |
| 10351 | CCAGCTCCTAGAGGGAGAGG |
| 10352 | CAGCTCCTAGAGGGAGAGGA |
| 10353 | AGCTCCTAGAGGGAGAGGAG |
| 10354 | GCTCCTAGAGGGAGAGGAGG |
| 10355 | CTCCTAGAGGGAGAGGAGGC |
| 10356 | TCCTAGAGGGAGAGGAGGCA |
| 10357 | CCTAGAGGGAGAGGAGGCAG |
| 10358 | CTAGAGGGAGAGGAGGCAGG |
| 10359 | TAGAGGGAGAGGAGGCAGGG |
| 10360 | AGAGGGAGAGGAGGCAGGGT |
| 10361 | GAGGGAGAGGAGGCAGGGTT |
| 10362 | AGGGAGAGGAGGCAGGGTTG |
| 10363 | GGGAGAGGAGGCAGGGTTGA |
| 10364 | GGAGAGGAGGCAGGGTTGAG |
| 10365 | GAGAGGAGGCAGGGTTGAGG |
| 10366 | AGAGGAGGCAGGGTTGAGGA |
| 10367 | GAGGAGGCAGGGTTGAGGAA |
| 10368 | AGGAGGCAGGGTTGAGGAAA |
| 10369 | GGAGGCAGGGTTGAGGAAAG |
| 10370 | GAGGCAGGGTTGAGGAAAGA |
| 10371 | AGGCAGGGTTGAGGAAAGAA |
| 10372 | GGCAGGGTTGAGGAAAGAAA |
| 10373 | GCAGGGTTGAGGAAAGAAAG |
| 10374 | CAGGGTTGAGGAAAGAAAGA |
| 10375 | AGGGTTGAGGAAAGAAAGAG |
| 10376 | GGGTTGAGGAAAGAAAGAGG |
| 10377 | GGTTGAGGAAAGAAAGAGGG |
| 10378 | GTTGAGGAAAGAAAGAGGGA |
| 10379 | TTGAGGAAAGAAAGAGGGAG |
| 10380 | TGAGGAAAGAAAGAGGGAGG |
| 10381 | GAGGAAAGAAAGAGGGAGGG |
| 10382 | AGGAAAGAAAGAGGGAGGGA |
| 10383 | GGAAAGAAAGAGGGAGGGAG |
| 10384 | GAAAGAAAGAGGGAGGGAGG |
| 10385 | AAAGAAAGAGGGAGGGAGGA |
| 10386 | AAGAAAGAGGGAGGGAGGAG |
| 10387 | AGAAAGAGGGAGGGAGGAGG |
| 10388 | GAAAGAGGGAGGGAGGAGGG |
| 10389 | AAAGAGGGAGGGAGGAGGGG |
| 10390 | AAGAGGGAGGGAGGAGGGGA |
| 10391 | AGAGGGAGGGAGGAGGGGAG |
| 10392 | GAGGGAGGGAGGAGGGGAGG |
| 10393 | AGGGAGGGAGGAGGGGAGGA |
| 10394 | GGGAGGGAGGAGGGGAGGAT |
| 10395 | GGAGGGAGGAGGGGAGGATG |
| 10396 | GAGGGAGGAGGGGAGGATGG |
| 10397 | AGGGAGGAGGGGAGGATGGC |
| 10398 | GGGAGGAGGGGAGGATGGCG |
| 10399 | GGAGGAGGGGAGGATGGCGT |
| 10400 | GAGGAGGGGAGGATGGCGTT |
| 10401 | AGGAGGGGAGGATGGCGTTG |
| 10402 | GGAGGGGAGGATGGCGTTGA |
| 10403 | GAGGGGAGGATGGCGTTGAG |
| 10404 | AGGGGAGGATGGCGTTGAGC |
| 10405 | GGGGAGGATGGCGTTGAGCA |
| 10406 | GGGAGGATGGCGTTGAGCAC |
| 10407 | GGAGGATGGCGTTGAGCACG |
| 10408 | GAGGATGGCGTTGAGCACGT |
| 10409 | AGGATGGCGTTGAGCACGTC |
| 10410 | GGATGGCGTTGAGCACGTCT |
| 10411 | GATGGCGTTGAGCACGTCTG |
| 10412 | ATGGCGTTGAGCACGTCTGG |
| 10413 | TGGCGTTGAGCACGTCTGGA |
| 10414 | GGCGTTGAGCACGTCTGGAG |
| 10415 | GCGTTGAGCACGTCTGGAGG |
| 10416 | CGTTGAGCACGTCTGGAGGC |
| 10417 | GTTGAGCACGTCTGGAGGCT |
| 10418 | TTGAGCACGTCTGGAGGCTC |
| 10419 | TGAGCACGTCTGGAGGCTCA |
| 10420 | GAGCACGTCTGGAGGCTCAG |
| 10421 | AGCACGTCTGGAGGCTCAGA |
| 10422 | GCACGTCTGGAGGCTCAGAC |
| 10423 | CACGTCTGGAGGCTCAGACG |
| 10424 | ACGTCTGGAGGCTCAGACGC |
| 10425 | CGTCTGGAGGCTCAGACGCT |
| 10426 | GTCTGGAGGCTCAGACGCTC |
| 10427 | TCTGGAGGCTCAGACGCTCC |
| 10428 | CTGGAGGCTCAGACGCTCCA |
| 10429 | TGGAGGCTCAGACGCTCCAG |
| 10430 | GGAGGCTCAGACGCTCCAGA |
| 10431 | GAGGCTCAGACGCTCCAGAC |
| 10432 | AGGCTCAGACGCTCCAGACT |
| 10433 | GGCTCAGACGCTCCAGACTG |
| 10434 | GCTCAGACGCTCCAGACTGG |
| 10435 | CTCAGACGCTCCAGACTGGG |
| 10436 | TCAGACGCTCCAGACTGGGA |
| 10437 | CAGACGCTCCAGACTGGGAG |
| 10438 | AGACGCTCCAGACTGGGAGG |
| 10439 | GACGCTCCAGACTGGGAGGA |
| 10440 | ACGCTCCAGACTGGGAGGAA |
| 10441 | CGCTCCAGACTGGGAGGAAC |
| 10442 | GCTCCAGACTGGGAGGAACC |
| 10443 | CTCCAGACTGGGAGGAACCG |
| 10444 | TCCAGACTGGGAGGAACCGC |
| 10445 | CCAGACTGGGAGGAACCGCC |
| 10446 | CAGACTGGGAGGAACCGCCC |
| 10447 | AGACTGGGAGGAACCGCCCC |
| 10448 | GACTGGGAGGAACCGCCCCC |
| 10449 | ACTGGGAGGAACCGCCCCCA |
| 10450 | CTGGGAGGAACCGCCCCCAG |
| 10451 | TGGGAGGAACCGCCCCCAGC |
| 10452 | GGGAGGAACCGCCCCCAGCC |
| 10453 | GGAGGAACCGCCCCCAGCCC |
| 10454 | GAGGAACCGCCCCCAGCCCA |
| 10455 | AGGAACCGCCCCCAGCCCAG |
| 10456 | GGAACCGCCCCCAGCCCAGC |
| 10457 | GAACCGCCCCCAGCCCAGCC |
| 10458 | AACCGCCCCCAGCCCAGCCG |
| 10459 | ACCGCCCCCAGCCCAGCCGG |
| 10460 | CCGCCCCCAGCCCAGCCGGA |
| 10461 | CGCCCCCAGCCCAGCCGGAA |
| 10462 | GCCCCCAGCCCAGCCGGAAA |
| 10463 | CCCCCAGCCCAGCCGGAAAA |
| 10464 | CCCCAGCCCAGCCGGAAAAG |
| 10465 | CCCAGCCCAGCCGGAAAAGT |
| 10466 | CCAGCCCAGCCGGAAAAGTA |
| 10467 | CAGCCCAGCCGGAAAAGTAG |
| 10468 | AGCCCAGCCGGAAAAGTAGG |
| 10469 | GCCCAGCCGGAAAAGTAGGG |
| 10470 | CCCAGCCGGAAAAGTAGGGG |
| 10471 | CCAGCCGGAAAAGTAGGGGA |
| 10472 | CAGCCGGAAAAGTAGGGGAA |
| 10473 | AGCCGGAAAAGTAGGGGAAA |
| 10474 | GCCGGAAAAGTAGGGGAAAG |
| 10475 | CCGGAAAAGTAGGGGAAAGG |
| 10476 | CGGAAAAGTAGGGGAAAGGT |
| 10477 | GGAAAAGTAGGGGAAAGGTC |
| 10478 | GAAAAGTAGGGGAAAGGTCG |
| 10479 | AAAAGTAGGGGAAAGGTCGA |
| 10480 | AAAGTAGGGGAAAGGTCGAA |
| 10481 | AAGTAGGGGAAAGGTCGAAA |
| 10482 | AGTAGGGGAAAGGTCGAAAT |
| 10483 | GTAGGGGAAAGGTCGAAATG |
| 10484 | TAGGGGAAAGGTCGAAATGA |
| 10485 | AGGGGAAAGGTCGAAATGAG |
| 10486 | GGGGAAAGGTCGAAATGAGT |
| 10487 | GGGAAAGGTCGAAATGAGTC |
| 10488 | GGAAAGGTCGAAATGAGTCT |
| 10489 | GAAAGGTCGAAATGAGTCTG |
| 10490 | AAAGGTCGAAATGAGTCTGC |
| 10491 | AAGGTCGAAATGAGTCTGCA |
| 10492 | AGGTCGAAATGAGTCTGCAC |
| 10493 | GGTCGAAATGAGTCTGCACG |
| 10494 | GTCGAAATGAGTCTGCACGG |
| 10495 | TCGAAATGAGTCTGCACGGT |
| 10496 | CGAAATGAGTCTGCACGGTG |
| 10497 | GAAATGAGTCTGCACGGTGG |
| 10498 | AAATGAGTCTGCACGGTGGG |
| 10499 | AATGAGTCTGCACGGTGGGG |
| 10500 | ATGAGTCTGCACGGTGGGGG |
| 10501 | TGAGTCTGCACGGTGGGGGT |
| 10502 | GAGTCTGCACGGTGGGGGTG |
| 10503 | AGTCTGCACGGTGGGGGTGG |
| 10504 | GTCTGCACGGTGGGGGTGGG |
| 10505 | TCTGCACGGTGGGGGTGGGG |
| 10506 | CTGCACGGTGGGGGTGGGGG |
| 10507 | TGCACGGTGGGGGTGGGGGC |
| 10508 | GCACGGTGGGGGTGGGGGCG |
| 10509 | CACGGTGGGGGTGGGGGCGG |
| 10510 | ACGGTGGGGGTGGGGGCGGG |
| 10511 | CGGTGGGGGTGGGGGCGGGC |
| 10512 | GGTGGGGGTGGGGGCGGGCC |
| 10513 | GTGGGGGTGGGGGCGGGCCC |
| 10514 | TGGGGGTGGGGGCGGGCCCA |
| 10515 | GGGGGTGGGGGCGGGCCCAG |
| 10516 | GGGGTGGGGGCGGGCCCAGA |
| 10517 | GGGTGGGGGCGGGCCCAGAG |
| 10518 | GGTGGGGGCGGGCCCAGAGT |
| 10519 | GTGGGGGCGGGCCCAGAGTG |
| 10520 | TGGGGGCGGGCCCAGAGTGA |
| 10521 | GGGGGCGGGCCCAGAGTGAC |
| 10522 | GGGGGGGGCCCAGAGTGACC |
| 10523 | GGGCGGGCCCAGAGTGACCA |
| 10524 | GGCGGGCCCAGAGTGACCAG |
| 10525 | GCGGGCCCAGAGTGACCAGG |
| 10526 | CGGGCCCAGAGTGACCAGGA |
| 10527 | GGGCCCAGAGTGACCAGGAA |
| 10528 | GGCCCAGAGTGACCAGGAAG |
| 10529 | GCCCAGAGTGACCAGGAAGA |
| 10530 | CCCAGAGTGACCAGGAAGAC |
| 10531 | CCAGAGTGACCAGGAAGACG |
| 10532 | CAGAGTGACCAGGAAGACGC |
| 10533 | AGAGTGACCAGGAAGACGCT |
| 10534 | GAGTGACCAGGAAGACGCTT |
| 10535 | AGTGACCAGGAAGACGCTTT |
| 10536 | GTGACCAGGAAGACGCTTTC |
| 10537 | TGACCAGGAAGACGCTTTCC |
| 10538 | GACCAGGAAGACGCTTTCCG |
| 10539 | ACCAGGAAGACGCTTTCCGG |
| 10540 | CCAGGAAGACGCTTTCCGGC |
| 10541 | CAGGAAGACGCTTTCCGGCC |
| 10542 | AGGAAGACGCTTTCCGGCCC |
| 10543 | GGAAGACGCTTTCCGGCCCC |
| 10544 | GAAGACGCTTTCCGGCCCCT |
| 10545 | AAGACGCTTTCCGGCCCCTC |
| 10546 | AGACGCTTTCCGGCCCCTCA |
| 10547 | GACGCTTTCCGGCCCCTCAG |
| 10548 | ACGCTTTCCGGCCCCTCAGG |
| 10549 | CGCTTTCCGGCCCCTCAGGC |
| 10550 | GCTTTCCGGCCCCTCAGGCA |
| 10551 | CTTTCCGGCCCCTCAGGCAT |
| 10552 | TTTCCGGCCCCTCAGGCATC |
| 10553 | TTCCGGCCCCTCAGGCATCT |
| 10554 | TCCGGCCCCTCAGGCATCTC |
| 10555 | CCGGCCCCTCAGGCATCTCC |
| 10556 | CGGCCCCTCAGGCATCTCCC |
| 10557 | GGCCCCTCAGGCATCTCCCC |
| 10558 | GCCCCTCAGGCATCTCCCCT |
| 10559 | CCCCTCAGGCATCTCCCCTT |
| 10560 | CCCTCAGGCATCTCCCCTTT |
| 10561 | CCTCAGGCATCTCCCCTTTC |
| 10562 | CTCAGGCATCTCCCCTTTCC |
| 10563 | TCAGGCATCTCCCCTTTCCC |
| 10564 | CAGGCATCTCCCCTTTCCCC |
| 10565 | AGGCATCTCCCCTTTCCCCT |
| 10566 | GGCATCTCCCCTTTCCCCTA |
| 10567 | GCATCTCCCCTTTCCCCTAC |
| 10568 | CATCTCCCCTTTCCCCTACT |
| 10569 | ATCTCCCCTTTCCCCTACTT |
| 10570 | TCTCCCCTTTCCCCTACTTT |
| 10571 | CTCCCCTTTCCCCTACTTTC |
| 10572 | TCCCCTTTCCCCTACTTTCC |
| 10573 | CCCCTTTCCCCTACTTTCCT |
| 10574 | CCCTTTCCCCTACTTTCCTC |
| 10575 | CCTTTCCCCTACTTTCCTCC |
| 10576 | CTTTCCCCTACTTTCCTCCC |
| 10577 | TTTCCCCTACTTTCCTCCCA |
| 10578 | TTCCCCTACTTTCCTCCCAT |
| 10579 | TCCCCTACTTTCCTCCCATC |
| 10580 | CCCCTACTTTCCTCCCATCC |
| 10581 | CCCTACTTTCCTCCCATCCA |
| 10582 | CCTACTTTCCTCCCATCCAG |
| 10583 | CTACTTTCCTCCCATCCAGT |
| 10584 | TACTTTCCTCCCATCCAGTA |
| 10585 | ACTTTCCTCCCATCCAGTAA |
| 10586 | CTTTCCTCCCATCCAGTAAG |
| 10587 | TTTCCTCCCATCCAGTAAGG |
| 10588 | TTCCTCCCATCCAGTAAGGA |
| 10589 | TCCTCCCATCCAGTAAGGAT |
| 10590 | CCTCCCATCCAGTAAGGATG |
| 10591 | CTCCCATCCAGTAAGGATGG |
| 10592 | TCCCATCCAGTAAGGATGGG |
| 10593 | CCCATCCAGTAAGGATGGGC |
| 10594 | CCATCCAGTAAGGATGGGCA |
| 10595 | CATCCAGTAAGGATGGGCAC |
| 10596 | ATCCAGTAAGGATGGGCACG |
| 10597 | TCCAGTAAGGATGGGCACGC |
| 10598 | CCAGTAAGGATGGGCACGCG |
| 10599 | CAGTAAGGATGGGCACGCGG |
| 10600 | AGTAAGGATGGGCACGCGGC |
| 10601 | GTAAGGATGGGCACGCGGCC |
| 10602 | TAAGGATGGGCACGCGGCCA |
| 10603 | AAGGATGGGCACGCGGCCAA |
| 10604 | AGGATGGGCACGCGGCCAAA |
| 10605 | GGATGGGCACGCGGCCAAAC |
| 10606 | GATGGGCACGCGGCCAAACC |
| 10607 | ATGGGCACGCGGCCAAACCA |
| 10608 | TGGGCACGCGGCCAAACCAC |
| 10609 | GGGCACGCGGCCAAACCACC |
| 10610 | GGCACGCGGCCAAACCACCA |
| 10611 | GCACGCGGCCAAACCACCAG |
| 10612 | CACGCGGCCAAACCACCAGT |
| 10613 | ACGCGGCCAAACCACCAGTG |
| 10614 | CGCGGCCAAACCACCAGTGT |
| 10615 | GCGGCCAAACCACCAGTGTG |
| 10616 | CGGCCAAACCACCAGTGTGG |
| 10617 | GGCCAAACCACCAGTGTGGC |
| 10618 | GCCAAACCACCAGTGTGGCT |
| 10619 | CCAAACCACCAGTGTGGCTT |
| 10620 | CAAACCACCAGTGTGGCTTC |
| 10621 | AAACCACCAGTGTGGCTTCC |
| 10622 | AACCACCAGTGTGGCTTCCA |
| 10623 | ACCACCAGTGTGGCTTCCAT |
| 10624 | CCACCAGTGTGGCTTCCATG |
| 10625 | CACCAGTGTGGCTTCCATGA |
| 10626 | ACCAGTGTGGCTTCCATGAA |
| 10627 | CCAGTGTGGCTTCCATGAAT |
| 10628 | CAGTGTGGCTTCCATGAATG |
| 10629 | AGTGTGGCTTCCATGAATGC |
| 10630 | GTGTGGCTTCCATGAATGCC |
| 10631 | TGTGGCTTCCATGAATGCCA |
| 10632 | GTGGCTTCCATGAATGCCAG |
| 10633 | TGGCTTCCATGAATGCCAGC |
| 10634 | GGCTTCCATGAATGCCAGCT |
| 10635 | GCTTCCATGAATGCCAGCTG |
| 10636 | CTTCCATGAATGCCAGCTGT |
| 10637 | TTCCATGAATGCCAGCTGTT |
| 10638 | TCCATGAATGCCAGCTGTTC |
| 10639 | CCATGAATGCCAGCTGTTCG |
| 10640 | CATGAATGCCAGCTGTTCGC |
| 10641 | ATGAATGCCAGCTGTTCGCC |
| 10642 | TGAATGCCAGCTGTTCGCCT |
| 10643 | GAATGCCAGCTGTTCGCCTT |
| 10644 | AATGCCAGCTGTTCGCCTTC |
| 10645 | ATGCCAGCTGTTCGCCTTCC |
| 10646 | TGCCAGCTGTTCGCCTTCCC |
| 10647 | GCCAGCTGTTCGCCTTCCCA |
| 10648 | CCAGCTGTTCGCCTTCCCAG |
| 10649 | CAGCTGTTCGCCTTCCCAGC |
| 10650 | AGCTGTTCGCCTTCCCAGCT |
| 10651 | GCTGTTCGCCTTCCCAGCTC |
| 10652 | CTGTTCGCCTTCCCAGCTCT |
| 10653 | TGTTCGCCTTCCCAGCTCTG |
| 10654 | GTTCGCCTTCCCAGCTCTGA |
| 10655 | TTCGCCTTCCCAGCTCTGAA |
| 10656 | TCGCCTTCCCAGCTCTGAAC |
| 10657 | CGCCTTCCCAGCTCTGAACT |
| 10658 | GCCTTCCCAGCTCTGAACTT |
| 10659 | CCTTCCCAGCTCTGAACTTT |
| 10660 | CTTCCCAGCTCTGAACTTTC |
| 10661 | TTCCCAGCTCTGAACTTTCT |
| 10662 | TCCCAGCTCTGAACTTTCTC |
| 10663 | CCCAGCTCTGAACTTTCTCC |
| 10664 | CCAGCTCTGAACTTTCTCCT |
| 10665 | CAGCTCTGAACTTTCTCCTA |
| 10666 | AGCTCTGAACTTTCTCCTAC |
| 10667 | GCTCTGAACTTTCTCCTACT |
| 10668 | CTCTGAACTTTCTCCTACTT |
| 10669 | TCTGAACTTTCTCCTACTTG |
| 10670 | CTGAACTTTCTCCTACTTGG |
| 10671 | TGAACTTTCTCCTACTTGGC |
| 10672 | GAACTTTCTCCTACTTGGCG |
| 10673 | AACTTTCTCCTACTTGGCGG |
| 10674 | ACTTTCTCCTACTTGGCGGG |
| 10675 | CTTTCTCCTACTTGGCGGGC |
| 10676 | TTTCTCCTACTTGGCGGGCC |
| 10677 | TTCTCCTACTTGGCGGGCCT |
| 10678 | TCTCCTACTTGGCGGGCCTG |
| 10679 | CTCCTACTTGGCGGGCCTGA |
| 10680 | TCCTACTTGGCGGGCCTGAG |
| 10681 | CCTACTTGGCGGGCCTGAGC |
| 10682 | CTACTTGGCGGGCCTGAGCC |
| 10683 | TACTTGGCGGGCCTGAGCCA |
| 10684 | ACTTGGCGGGCCTGAGCCAA |
| 10685 | CTTGGCGGGCCTGAGCCAAG |
| 10686 | TTGGCGGGCCTGAGCCAAGA |
| 10687 | TGGCGGGCCTGAGCCAAGAG |
| 10688 | GGCGGGCCTGAGCCAAGAGT |
| 10689 | GCGGGCCTGAGCCAAGAGTC |
| 10690 | CGGGCCTGAGCCAAGAGTCT |
| 10691 | GGGCCTGAGCCAAGAGTCTG |
| 10692 | GGCCTGAGCCAAGAGTCTGG |
| 10693 | GCCTGAGCCAAGAGTCTGGG |
| 10694 | CCTGAGCCAAGAGTCTGGGA |
| 10695 | CTGAGCCAAGAGTCTGGGAG |
| 10696 | TGAGCCAAGAGTCTGGGAGT |
| 10697 | GAGCCAAGAGTCTGGGAGTC |
| 10698 | AGCCAAGAGTCTGGGAGTCC |
| 10699 | GCCAAGAGTCTGGGAGTCCC |
| 10700 | CCAAGAGTCTGGGAGTCCCG |
| 10701 | CAAGAGTCTGGGAGTCCCGA |
| 10702 | AAGAGTCTGGGAGTCCCGAA |
| 10703 | AGAGTCTGGGAGTCCCGAAC |
| 10704 | GAGTCTGGGAGTCCCGAACC |
| 10705 | AGTCTGGGAGTCCCGAACCC |
| 10706 | GTCTGGGAGTCCCGAACCCA |
| 10707 | TCTGGGAGTCCCGAACCCAC |
| 10708 | CTGGGAGTCCCGAACCCACA |
| 10709 | TGGGAGTCCCGAACCCACAG |
| 10710 | GGGAGTCCCGAACCCACAGA |
| 10711 | GGAGTCCCGAACCCACAGAA |
| 10712 | GAGTCCCGAACCCACAGAAC |
| 10713 | AGTCCCGAACCCACAGAACC |
| 10714 | GTCCCGAACCCACAGAACCC |
| 10715 | TCCCGAACCCACAGAACCCC |
| 10716 | CCCGAACCCACAGAACCCCT |
| 10717 | CCGAACCCACAGAACCCCTG |
| 10718 | CGAACCCACAGAACCCCTGC |
| 10719 | GAACCCACAGAACCCCTGCC |
| 10720 | AACCCACAGAACCCCTGCCC |
| 10721 | ACCCACAGAACCCCTGCCCC |
| 10722 | CCCACAGAACCCCTGCCCCC |
| 10723 | CCACAGAACCCCTGCCCCCT |
| 10724 | CACAGAACCCCTGCCCCCTT |
| 10725 | ACAGAACCCCTGCCCCCTTC |
| 10726 | CAGAACCCCTGCCCCCTTCC |
| 10727 | AGAACCCCTGCCCCCTTCCA |
| 10728 | GAACCCCTGCCCCCTTCCAC |
| 10729 | AACCCCTGCCCCCTTCCACC |
| 10730 | ACCCCTGCCCCCTTCCACCG |
| 10731 | CCCCTGCCCCCTTCCACCGC |
| 10732 | CCCTGCCCCCTTCCACCGCA |
| 10733 | CCTGCCCCCTTCCACCGCAT |
| 10734 | CTGCCCCCTTCCACCGCATT |
| 10735 | TGCCCCCTTCCACCGCATTT |
| 10736 | GCCCCCTTCCACCGCATTTC |
| 10737 | CCCCCTTCCACCGCATTTCC |
| 10738 | CCCCTTCCACCGCATTTCCC |
| 10739 | CCCTTCCACCGCATTTCCCA |
| 10740 | CCTTCCACCGCATTTCCCAG |
| 10741 | CTTCCACCGCATTTCCCAGC |
| 10742 | TTCCACCGCATTTCCCAGCC |
| 10743 | TCCACCGCATTTCCCAGCCA |
| 10744 | CCACCGCATTTCCCAGCCAG |
| 10745 | CACCGCATTTCCCAGCCAGG |
| 10746 | ACCGCATTTCCCAGCCAGGA |
| 10747 | CCGCATTTCCCAGCCAGGAC |
| 10748 | CGCATTTCCCAGCCAGGACT |
| 10749 | GCATTTCCCAGCCAGGACTT |
| 10750 | CATTTCCCAGCCAGGACTTG |
| 10751 | ATTTCCCAGCCAGGACTTGT |
| 10752 | TTTCCCAGCCAGGACTTGTG |
| 10753 | TTCCCAGCCAGGACTTGTGC |
| 10754 | TCCCAGCCAGGACTTGTGCC |
| 10755 | CCCAGCCAGGACTTGTGCCT |
| 10756 | CCAGCCAGGACTTGTGCCTT |
| 10757 | CAGCCAGGACTTGTGCCTTC |
| 10758 | AGCCAGGACTTGTGCCTTCC |
| 10759 | GCCAGGACTTGTGCCTTCCC |
| 10760 | CCAGGACTTGTGCCTTCCCC |
| 10761 | CAGGACTTGTGCCTTCCCCC |
| 10762 | AGGACTTGTGCCTTCCCCCG |
| 10763 | GGACTTGTGCCTTCCCCCGT |
| 10764 | GACTTGTGCCTTCCCCCGTC |
| 10765 | ACTTGTGCCTTCCCCCGTCA |
| 10766 | CTTGTGCCTTCCCCCGTCAC |
| 10767 | TTGTGCCTTCCCCCGTCACC |
| 10768 | TGTGCCTTCCCCCGTCACCC |
| 10769 | GTGCCTTCCCCCGTCACCCT |
| 10770 | TGCCTTCCCCCGTCACCCTC |
| 10771 | GCCTTCCCCCGTCACCCTCC |
| 10772 | CCTTCCCCCGTCACCCTCCA |
| 10773 | CTTCCCCCGTCACCCTCCAG |
| 10774 | TTCCCCCGTCACCCTCCAGA |
| 10775 | TCCCCCGTCACCCTCCAGAA |
| 10776 | CCCCCGTCACCCTCCAGAAG |
| 10777 | CCCCGTCACCCTCCAGAAGC |
| 10778 | CCCGTCACCCTCCAGAAGCC |
| 10779 | CCGTCACCCTCCAGAAGCCC |
| 10780 | CGTCACCCTCCAGAAGCCCC |
| 10781 | GTCACCCTCCAGAAGCCCCT |
| 10782 | TCACCCTCCAGAAGCCCCTC |
| 10783 | CACCCTCCAGAAGCCCCTCA |
| 10784 | ACCCTCCAGAAGCCCCTCAT |
| 10785 | CCCTCCAGAAGCCCCTCATC |
| 10786 | CCTCCAGAAGCCCCTCATCC |
| 10787 | CTCCAGAAGCCCCTCATCCT |
| 10788 | TCCAGAAGCCCCTCATCCTG |
| 10789 | CCAGAAGCCCCTCATCCTGG |
| 10790 | CAGAAGCCCCTCATCCTGGG |
| 10791 | AGAAGCCCCTCATCCTGGGA |
| 10792 | GAAGCCCCTCATCCTGGGAT |
| 10793 | AAGCCCCTCATCCTGGGATG |
| 10794 | AGCCCCTCATCCTGGGATGG |
| 10795 | GCCCCTCATCCTGGGATGGT |
| 10796 | CCCCTCATCCTGGGATGGTG |
| 10797 | CCCTCATCCTGGGATGGTGG |
| 10798 | CCTCATCCTGGGATGGTGGC |
| 10799 | CTCATCCTGGGATGGTGGCT |
| 10800 | TCATCCTGGGATGGTGGCTT |
| 10801 | CATCCTGGGATGGTGGCTTT |
| 10802 | ATCCTGGGATGGTGGCTTTG |
| 10803 | TCCTGGGATGGTGGCTTTGG |
| 10804 | CCTGGGATGGTGGCTTTGGG |
| 10805 | CTGGGATGGTGGCTTTGGGA |
| 10806 | TGGGATGGTGGCTTTGGGAG |
| 10807 | GGGATGGTGGCTTTGGGAGG |
| 10808 | GGATGGTGGCTTTGGGAGGG |
| 10809 | GATGGTGGCTTTGGGAGGGT |
| 10810 | ATGGTGGCTTTGGGAGGGTG |
| 10811 | TGGTGGCTTTGGGAGGGTGG |
| 10812 | GGTGGCTTTGGGAGGGTGGA |
| 10813 | GTGGCTTTGGGAGGGTGGAC |
| 10814 | TGGCTTTGGGAGGGTGGACA |
| 10815 | GGCTTTGGGAGGGTGGACAG |
| 10816 | GCTTTGGGAGGGTGGACAGG |
| 10817 | CTTTGGGAGGGTGGACAGGA |
| 10818 | TTTGGGAGGGTGGACAGGAC |
| 10819 | TTGGGAGGGTGGACAGGACC |
| 10820 | TGGGAGGGTGGACAGGACCC |
| 10821 | GGGAGGGTGGACAGGACCCT |
| 10822 | GGAGGGTGGACAGGACCCTG |
| 10823 | GAGGGTGGACAGGACCCTGA |
| 10824 | AGGGTGGACAGGACCCTGAC |
| 10825 | GGGTGGACAGGACCCTGACC |
| 10826 | GGTGGACAGGACCCTGACCA |
| 10827 | GTGGACAGGACCCTGACCAC |
| 10828 | TGGACAGGACCCTGACCACG |
| 10829 | GGACAGGACCCTGACCACGC |
| 10830 | GACAGGACCCTGACCACGCT |
| 10831 | ACAGGACCCTGACCACGCTG |
| 10832 | CAGGACCCTGACCACGCTGA |
| 10833 | AGGACCCTGACCACGCTGAG |
| 10834 | GGACCCTGACCACGCTGAGA |
| 10835 | GACCCTGACCACGCTGAGAT |
| 10836 | ACCCTGACCACGCTGAGATG |
| 10837 | CCCTGACCACGCTGAGATGC |
| 10838 | CCTGACCACGCTGAGATGCT |
| 10839 | CTGACCACGCTGAGATGCTA |
| 10840 | TGACCACGCTGAGATGCTAG |
| 10841 | GACCACGCTGAGATGCTAGC |
| 10842 | ACCACGCTGAGATGCTAGCC |
| 10843 | CCACGCTGAGATGCTAGCCT |
| 10844 | CACGCTGAGATGCTAGCCTG |
| 10845 | ACGCTGAGATGCTAGCCTGG |
| 10846 | CGCTGAGATGCTAGCCTGGC |
| 10847 | GCTGAGATGCTAGCCTGGCG |
| 10848 | CTGAGATGCTAGCCTGGCGG |
| 10849 | TGAGATGCTAGCCTGGCGGG |
| 10850 | GAGATGCTAGCCTGGCGGGG |
| 10851 | AGATGCTAGCCTGGCGGGGT |
| 10852 | GATGCTAGCCTGGCGGGGTT |
| 10853 | ATGCTAGCCTGGCGGGGTTG |
| 10854 | TGCTAGCCTGGCGGGGTTGG |
| 10855 | GCTAGCCTGGCGGGGTTGGG |
| 10856 | CTAGCCTGGCGGGGTTGGGG |
| 10857 | TAGCCTGGCGGGGTTGGGGG |
| 10858 | AGCCTGGCGGGGTTGGGGGC |
| 10859 | GCCTGGCGGGGTTGGGGGCG |
| 10860 | CCTGGCGGGGTTGGGGGCGG |
| 10861 | CTGGCGGGGTTGGGGGCGGG |
| 10862 | TGGCGGGGTTGGGGGCGGGC |
| 10863 | GGCGGGGTTGGGGGGGGCA |
| 10864 | GCGGGGTTGGGGGGGGCAG |
| 10865 | CGGGGTTGGGGGCGGGCAGC |
| 10866 | GGGGTTGGGGGCGGGCAGCA |
| 10867 | GGGTTGGGGGGGGCAGCAC |
| 10868 | GGTTGGGGGCGGGCAGCACG |
| 10869 | GTTGGGGGCGGGCAGCACGG |
| 10870 | TTGGGGGCGGGCAGCACGGA |
| 10871 | TGGGGGCGGGCAGCACGGAG |
| 10872 | GGGGGCGGGCAGCACGGAGG |
| 10873 | GGGGCGGGCAGCACGGAGGT |
| 10874 | GGGCGGGCAGCACGGAGGTG |
| 10875 | GGCGGGCAGCACGGAGGTGG |
| 10876 | GCGGGCAGCACGGAGGTGGG |
| 10877 | CGGGCAGCACGGAGGTGGGA |
| 10878 | GGGCAGCACGGAGGTGGGAA |
| 10879 | GGCAGCACGGAGGTGGGAAG |
| 10880 | GCAGCACGGAGGTGGGAAGG |
| 10881 | CAGCACGGAGGTGGGAAGGA |
| 10882 | AGCACGGAGGTGGGAAGGAG |
| 10883 | GCACGGAGGTGGGAAGGAGC |
| 10884 | CACGGAGGTGGGAAGGAGCG |
| 10885 | ACGGAGGTGGGAAGGAGCGG |
| 10886 | CGGAGGTGGGAAGGAGCGGG |
| 10887 | GGAGGTGGGAAGGAGCGGGA |
| 10888 | GAGGTGGGAAGGAGCGGGAG |
| 10889 | AGGTGGGAAGGAGCGGGAGC |
| 10890 | GGTGGGAAGGAGCGGGAGCT |
| 10891 | GTGGGAAGGAGCGGGAGCTT |
| 10892 | TGGGAAGGAGCGGGAGCTTG |
| 10893 | GGGAAGGAGCGGGAGCTTGG |
| 10894 | GGAAGGAGCGGGAGCTTGGG |
| 10895 | GAAGGAGCGGGAGCTTGGGG |
| 10896 | AAGGAGCGGGAGCTTGGGGA |
| 10897 | AGGAGCGGGAGCTTGGGGAG |
| 10898 | GGAGCGGGAGCTTGGGGAGG |
| 10899 | GAGCGGGAGCTTGGGGAGGA |
| 10900 | AGCGGGAGCTTGGGGAGGAG |
| 10901 | GCGGGAGCTTGGGGAGGAGA |
| 10902 | CGGGAGCTTGGGGAGGAGAG |
| 10903 | GGGAGCTTGGGGAGGAGAGA |
| 10904 | GGAGCTTGGGGAGGAGAGAA |
| 10905 | GAGCTTGGGGAGGAGAGAAC |
| 10906 | AGCTTGGGGAGGAGAGAACC |
| 10907 | GCTTGGGGAGGAGAGAACCC |
| 10908 | CTTGGGGAGGAGAGAACCCT |
| 10909 | TTGGGGAGGAGAGAACCCTC |
| 10910 | TGGGGAGGAGAGAACCCTCA |
| 10911 | GGGGAGGAGAGAACCCTCAG |
| 10912 | GGGAGGAGAGAACCCTCAGG |
| 10913 | GGAGGAGAGAACCCTCAGGT |
| 10914 | GAGGAGAGAACCCTCAGGTC |
| 10915 | AGGAGAGAACCCTCAGGTCT |
| 10916 | GGAGAGAACCCTCAGGTCTA |
| 10917 | GAGAGAACCCTCAGGTCTAC |
| 10918 | AGAGAACCCTCAGGTCTACA |
| 10919 | GAGAACCCTCAGGTCTACAG |
| 10920 | AGAACCCTCAGGTCTACAGT |
| 10921 | GAACCCTCAGGTCTACAGTG |
| 10922 | AACCCTCAGGTCTACAGTGC |
| 10923 | ACCCTCAGGTCTACAGTGCT |
| 10924 | CCCTCAGGTCTACAGTGCTG |
| 10925 | CCTCAGGTCTACAGTGCTGG |
| 10926 | CTCAGGTCTACAGTGCTGGA |
| 10927 | TCAGGTCTACAGTGCTGGAA |
| 10928 | CAGGTCTACAGTGCTGGAAG |
| 10929 | AGGTCTACAGTGCTGGAAGC |
| 10930 | GGTCTACAGTGCTGGAAGCC |
| 10931 | GTCTACAGTGCTGGAAGCCT |
| 10932 | TCTACAGTGCTGGAAGCCTG |
| 10933 | CTACAGTGCTGGAAGCCTGC |
| 10934 | TACAGTGCTGGAAGCCTGCC |
| 10935 | ACAGTGCTGGAAGCCTGCCA |
| 10936 | CAGTGCTGGAAGCCTGCCAC |
| 10937 | AGTGCTGGAAGCCTGCCACT |
| 10938 | GTGCTGGAAGCCTGCCACTG |
| 10939 | TGCTGGAAGCCTGCCACTGA |
| 10940 | GCTGGAAGCCTGCCACTGAC |
| 10941 | CTGGAAGCCTGCCACTGACC |
| 10942 | TGGAAGCCTGCCACTGACCC |
| 10943 | GGAAGCCTGCCACTGACCCT |
| 10944 | GAAGCCTGCCACTGACCCTA |
| 10945 | AAGCCTGCCACTGACCCTAG |
| 10946 | AGCCTGCCACTGACCCTAGG |
| 10947 | GCCTGCCACTGACCCTAGGG |
| 10948 | CCTGCCACTGACCCTAGGGT |
| 10949 | CTGCCACTGACCCTAGGGTG |
| 10950 | TGCCACTGACCCTAGGGTGT |
| 10951 | GCCACTGACCCTAGGGTGTG |
| 10952 | CCACTGACCCTAGGGTGTGA |
| 10953 | CACTGACCCTAGGGTGTGAG |
| 10954 | ACTGACCCTAGGGTGTGAGA |
| 10955 | CTGACCCTAGGGTGTGAGAG |
| 10956 | TGACCCTAGGGTGTGAGAGG |
| 10957 | GACCCTAGGGTGTGAGAGGG |
| 10958 | ACCCTAGGGTGTGAGAGGGG |
| 10959 | CCCTAGGGTGTGAGAGGGGG |
| 10960 | CCTAGGGTGTGAGAGGGGGA |
| 10961 | CTAGGGTGTGAGAGGGGGAT |
| 10962 | TAGGGTGTGAGAGGGGGATC |
| 10963 | AGGGTGTGAGAGGGGGATCC |
| 10964 | GGGTGTGAGAGGGGGATCCA |
| 10965 | GGTGTGAGAGGGGGATCCAA |
| 10966 | GTGTGAGAGGGGGATCCAAA |
| 10967 | TGTGAGAGGGGGATCCAAAC |
| 10968 | GTGAGAGGGGGATCCAAACT |
| 10969 | TGAGAGGGGGATCCAAACTT |
| 10970 | GAGAGGGGGATCCAAACTTT |
| 10971 | AGAGGGGGATCCAAACTTTC |
| 10972 | GAGGGGGATCCAAACTTTCA |
| 10973 | AGGGGGATCCAAACTTTCAC |
| 10974 | GGGGGATCCAAACTTTCACC |
| 10975 | GGGGATCCAAACTTTCACCC |
| 10976 | GGGATCCAAACTTTCACCCA |
| 10977 | GGATCCAAACTTTCACCCAG |
| 10978 | GATCCAAACTTTCACCCAGT |
| 10979 | ATCCAAACTTTCACCCAGTT |
| 10980 | TCCAAACTTTCACCCAGTTG |
| 10981 | CCAAACTTTCACCCAGTTGG |
| 10982 | CAAACTTTCACCCAGTTGGC |
| 10983 | AAACTTTCACCCAGTTGGCT |
| 10984 | AACTTTCACCCAGTTGGCTG |
| 10985 | ACTTTCACCCAGTTGGCTGT |
| 10986 | CTTTCACCCAGTTGGCTGTG |
| 10987 | TTTCACCCAGTTGGCTGTGG |
| 10988 | TTCACCCAGTTGGCTGTGGA |
| 10989 | TCACCCAGTTGGCTGTGGAC |
| 10990 | CACCCAGTTGGCTGTGGACA |
| 10991 | ACCCAGTTGGCTGTGGACAG |
| 10992 | CCCAGTTGGCTGTGGACAGC |
| 10993 | CCAGTTGGCTGTGGACAGCC |
| 10994 | CAGTTGGCTGTGGACAGCCA |
| 10995 | AGTTGGCTGTGGACAGCCAC |
| 10996 | GTTGGCTGTGGACAGCCACA |
| 10997 | TTGGCTGTGGACAGCCACAG |
| 10998 | TGGCTGTGGACAGCCACAGA |
| 10999 | GGCTGTGGACAGCCACAGAT |
| 11000 | GCTGTGGACAGCCACAGATG |
| 11001 | CTGTGGACAGCCACAGATGC |
| 11002 | TGTGGACAGCCACAGATGCA |
| 11003 | GTGGACAGCCACAGATGCAG |
| 11004 | TGGACAGCCACAGATGCAGG |
| 11005 | GGACAGCCACAGATGCAGGG |
| 11006 | GACAGCCACAGATGCAGGGA |
| 11007 | ACAGCCACAGATGCAGGGAA |
| 11008 | CAGCCACAGATGCAGGGAAG |
| 11009 | AGCCACAGATGCAGGGAAGG |
| 11010 | GCCACAGATGCAGGGAAGGA |
| 11011 | CCACAGATGCAGGGAAGGAT |
| 11012 | CACAGATGCAGGGAAGGATG |
| 11013 | ACAGATGCAGGGAAGGATGA |
| 11014 | CAGATGCAGGGAAGGATGAG |
| 11015 | AGATGCAGGGAAGGATGAGG |
| 11016 | GATGCAGGGAAGGATGAGGA |
| 11017 | ATGCAGGGAAGGATGAGGAC |
| 11018 | TGCAGGGAAGGATGAGGACC |
| 11019 | GCAGGGAAGGATGAGGACCA |
| 11020 | CAGGGAAGGATGAGGACCAC |
| 11021 | AGGGAAGGATGAGGACCACA |
| 11022 | GGGAAGGATGAGGACCACAG |
| 11023 | GGAAGGATGAGGACCACAGA |
| 11024 | GAAGGATGAGGACCACAGAG |
| 11025 | AAGGATGAGGACCACAGAGA |
| 11026 | AGGATGAGGACCACAGAGAA |
| 11027 | GGATGAGGACCACAGAGAAA |
| 11028 | GATGAGGACCACAGAGAAAC |
| 11029 | ATGAGGACCACAGAGAAACC |
| 11030 | TGAGGACCACAGAGAAACCG |
| 11031 | GAGGACCACAGAGAAACCGT |
| 11032 | AGGACCACAGAGAAACCGTG |
| 11033 | GGACCACAGAGAAACCGTGT |
| 11034 | GACCACAGAGAAACCGTGTG |
| 11035 | ACCACAGAGAAACCGTGTGG |
| 11036 | CCACAGAGAAACCGTGTGGG |
| 11037 | CACAGAGAAACCGTGTGGGG |
| 11038 | ACAGAGAAACCGTGTGGGGC |
| 11039 | CAGAGAAACCGTGTGGGGCC |
| 11040 | AGAGAAACCGTGTGGGGCCG |
| 11041 | GAGAAACCGTGTGGGGCCGT |
| 11042 | AGAAACCGTGTGGGGCCGTG |
| 11043 | GAAACCGTGTGGGGCCGTGA |
| 11044 | AAACCGTGTGGGGCCGTGAA |
| 11045 | AACCGTGTGGGGCCGTGAAC |
| 11046 | ACCGTGTGGGGCCGTGAACT |
| 11047 | CCGTGTGGGGCCGTGAACTT |
| 11048 | CGTGTGGGGCCGTGAACTTA |
| 11049 | GTGTGGGGCCGTGAACTTAG |
| 11050 | TGTGGGGCCGTGAACTTAGA |
| 11051 | GTGGGGCCGTGAACTTAGAG |
| 11052 | TGGGGCCGTGAACTTAGAGA |
| 11053 | GGGGCCGTGAACTTAGAGAA |
| 11054 | GGGCCGTGAACTTAGAGAAC |
| 11055 | GGCCGTGAACTTAGAGAACC |
| 11056 | GCCGTGAACTTAGAGAACCG |
| 11057 | CCGTGAACTTAGAGAACCGC |
| 11058 | CGTGAACTTAGAGAACCGCG |
| 11059 | GTGAACTTAGAGAACCGCGA |
| 11060 | TGAACTTAGAGAACCGCGAG |
| 11061 | GAACTTAGAGAACCGCGAGT |
| 11062 | AACTTAGAGAACCGCGAGTC |
| 11063 | ACTTAGAGAACCGCGAGTCT |
| 11064 | CTTAGAGAACCGCGAGTCTG |
| 11065 | TTAGAGAACCGCGAGTCTGC |
| 11066 | TAGAGAACCGCGAGTCTGCA |
| 11067 | AGAGAACCGCGAGTCTGCAT |
| 11068 | GAGAACCGCGAGTCTGCATC |
| 11069 | AGAACCGCGAGTCTGCATCG |
| 11070 | GAACCGCGAGTCTGCATCGG |
| 11071 | AACCGCGAGTCTGCATCGGA |
| 11072 | ACCGCGAGTCTGCATCGGAC |
| 11073 | CCGCGAGTCTGCATCGGACA |
| 11074 | CGCGAGTCTGCATCGGACAC |
| 11075 | GCGAGTCTGCATCGGACACA |
| 11076 | CGAGTCTGCATCGGACACAC |
| 11077 | GAGTCTGCATCGGACACACG |
| 11078 | AGTCTGCATCGGACACACGT |
| 11079 | GTCTGCATCGGACACACGTG |
| 11080 | TCTGCATCGGACACACGTGG |
| 11081 | CTGCATCGGACACACGTGGA |
| 11082 | TGCATCGGACACACGTGGAC |
| 11083 | GCATCGGACACACGTGGACA |
| 11084 | CATCGGACACACGTGGACAT |
| 11085 | ATCGGACACACGTGGACATG |
| 11086 | TCGGACACACGTGGACATGC |
| 11087 | CGGACACACGTGGACATGCT |
| 11088 | GGACACACGTGGACATGCTG |
| 11089 | GACACACGTGGACATGCTGT |
| 11090 | ACACACGTGGACATGCTGTG |
| 11091 | CACACGTGGACATGCTGTGG |
| 11092 | ACACGTGGACATGCTGTGGT |
| 11093 | CACGTGGACATGCTGTGGTT |
| 11094 | ACGTGGACATGCTGTGGTTC |
| 11095 | CGTGGACATGCTGTGGTTCG |
| 11096 | GTGGACATGCTGTGGTTCGA |
| 11097 | TGGACATGCTGTGGTTCGAG |
| 11098 | GGACATGCTGTGGTTCGAGA |
| 11099 | GACATGCTGTGGTTCGAGAT |
| 11100 | ACATGCTGTGGTTCGAGATG |
| 11101 | CATGCTGTGGTTCGAGATGA |
| 11102 | ATGCTGTGGTTCGAGATGAA |
| 11103 | TGCTGTGGTTCGAGATGAAC |
| 11104 | GCTGTGGTTCGAGATGAACG |
| 11105 | CTGTGGTTCGAGATGAACGG |
| 11106 | TGTGGTTCGAGATGAACGGA |
| 11107 | GTGGTTCGAGATGAACGGAG |
| 11108 | TGGTTCGAGATGAACGGAGA |
| 11109 | GGTTCGAGATGAACGGAGAT |
| 11110 | GTTCGAGATGAACGGAGATT |
| 11111 | TTCGAGATGAACGGAGATTT |
| 11112 | TCGAGATGAACGGAGATTTG |
| 11113 | CGAGATGAACGGAGATTTGG |
| 11114 | GAGATGAACGGAGATTTGGG |
| 11115 | AGATGAACGGAGATTTGGGA |
| 11116 | GATGAACGGAGATTTGGGAA |
| 11117 | ATGAACGGAGATTTGGGAAT |
| 11118 | TGAACGGAGATTTGGGAATA |
| 11119 | GAACGGAGATTTGGGAATAA |
| 11120 | AACGGAGATTTGGGAATAAA |
| 11121 | ACGGAGATTTGGGAATAAAG |
| 11122 | CGGAGATTTGGGAATAAAGC |
| 11123 | GGAGATTTGGGAATAAAGCA |
| 11124 | GAGATTTGGGAATAAAGCAC |
| 11125 | AGATTTGGGAATAAAGCACC |
| 11126 | GATTTGGGAATAAAGCACCT |
| 11127 | ATTTGGGAATAAAGCACCTA |
| 11128 | TTTGGGAATAAAGCACCTAC |
| 11129 | TTGGGAATAAAGCACCTACA |
| 11130 | TGGGAATAAAGCACCTACAA |
| 11131 | GGGAATAAAGCACCTACAAC |
| 11132 | GGAATAAAGCACCTACAACT |
| 11133 | GAATAAAGCACCTACAACTT |
| 11134 | AATAAAGCACCTACAACTTG |
| 11135 | ATAAAGCACCTACAACTTGT |
| 11136 | TAAAGCACCTACAACTTGTG |
| 11137 | AAAGCACCTACAACTTGTGG |
| 11138 | AAGCACCTACAACTTGTGGT |
| 11139 | AGCACCTACAACTTGTGGTG |
| 11140 | GCACCTACAACTTGTGGTGG |
| 11141 | CACCTACAACTTGTGGTGGC |
| 11142 | ACCTACAACTTGTGGTGGCA |
| 11143 | CCTACAACTTGTGGTGGCAG |
| 11144 | CTACAACTTGTGGTGGCAGC |
| 11145 | TACAACTTGTGGTGGCAGCA |
| 11146 | ACAACTTGTGGTGGCAGCAA |
| 11147 | CAACTTGTGGTGGCAGCAAA |
| 11148 | AACTTGTGGTGGCAGCAAAA |
| 11149 | ACTTGTGGTGGCAGCAAAAG |
| 11150 | CTTGTGGTGGCAGCAAAAGC |
| 11151 | TTGTGGTGGCAGCAAAAGCC |
| 11152 | TGTGGTGGCAGCAAAAGCCC |
| 11153 | GTGGTGGCAGCAAAAGCCCA |
| 11154 | TGGTGGCAGCAAAAGCCCAC |
| 11155 | GGTGGCAGCAAAAGCCCACT |
| 11156 | GTGGCAGCAAAAGCCCACTT |
| 11157 | TGGCAGCAAAAGCCCACTTT |
| 11158 | GGCAGCAAAAGCCCACTTTC |
| 11159 | GCAGCAAAAGCCCACTTTCT |
| 11160 | CAGCAAAAGCCCACTTTCTG |
| 11161 | AGCAAAAGCCCACTTTCTGC |
| 11162 | GCAAAAGCCCACTTTCTGCG |
| 11163 | CAAAAGCCCACTTTCTGCGG |
| 11164 | AAAAGCCCACTTTCTGCGGT |
| 11165 | AAAGCCCACTTTCTGCGGTG |
| 11166 | AAGCCCACTTTCTGCGGTGG |
| 11167 | AGCCCACTTTCTGCGGTGGG |
| 11168 | GCCCACTTTCTGCGGTGGGG |
| 11169 | CCCACTTTCTGCGGTGGGGA |
| 11170 | CCACTTTCTGCGGTGGGGAG |
| 11171 | CACTTTCTGCGGTGGGGAGG |
| 11172 | ACTTTCTGCGGTGGGGAGGG |
| 11173 | CTTTCTGCGGTGGGGAGGGG |
| 11174 | TTTCTGCGGTGGGGAGGGGG |
| 11175 | TTCTGCGGTGGGGAGGGGGC |
| 11176 | TCTGCGGTGGGGAGGGGGCC |
| 11177 | CTGCGGTGGGGAGGGGGCCG |
| 11178 | TGCGGTGGGGAGGGGGCCGG |
| 11179 | GCGGTGGGGAGGGGGCCGGC |
| 11180 | CGGTGGGGAGGGGGCCGGCG |
| 11181 | GGTGGGGAGGGGGCCGGCGG |
| 11182 | GTGGGGAGGGGGCCGGCGGG |
| 11183 | TGGGGAGGGGGCCGGCGGGG |
| 11184 | GGGGAGGGGGCCCGGCGGGG |
| 11185 | GGGAGGGGGCCGGCGGGGGC |
| 11186 | GGAGGGGGCCGGCGGGGGCG |
| 11187 | GAGGGGGCCGGCGGGGGCGG |
| 11188 | AGGGGGCCGGCGGGGGCGGG |
| 11189 | GGGGGCCGGCGGGGGCGGGG |
| 11190 | GGGGCCGGCGGGGCGGGGGA |
| 11191 | GGGCCGGCGGGGGCGGGGAG |
| 11192 | GGCCGGCGGGGGCGGGGAGG |
| 11193 | GCCGGCGGGGGCGGGGAGGG |
| 11194 | CCGGCGGGGGCGGGGAGGGA |
| 11195 | CGGCGGGGGCGGGGAGGGAG |
| 11196 | GGCGGGGGCGGGGAGGGAGG |
| 11197 | GCGGGGGCGGGGAGGGAGGA |
| 11198 | CGGGGGCGGGGAGGGAGGAG |
| 11199 | GGGGGCGGGGAGGGAGGAGG |
| 11200 | GGGGCGGGGAGGGAGGAGGA |
| 11201 | GGGCGGGGAGGGAGGAGGAG |
| 11202 | GGCGGGGAGGGAGGAGGAGA |
| 11203 | GCGGGGAGGGAGGAGGAGAA |
| 11204 | CGGGGAGGGAGGAGGAGAAC |
| 11205 | GGGGAGGGAGGAGGAGAACA |
| 11206 | GGGAGGGAGGAGGAGAACAA |
| 11207 | GGAGGGAGGAGGAGAACAAG |
| 11208 | GAGGGAGGAGGAGAACAAGA |
| 11209 | AGGGAGGAGGAGAACAAGAG |
| 11210 | GGGAGGAGGAGAACAAGAGA |
| 11211 | GGAGGAGGAGAACAAGAGAG |
| 11212 | GAGGAGGAGAACAAGAGAGG |
| 11213 | AGGAGGAGAACAAGAGAGGA |
| 11214 | GGAGGAGAACAAGAGAGGAA |
| 11215 | GAGGAGAACAAGAGAGGAAG |
| 11216 | AGGAGAACAAGAGAGGAAGG |
| 11217 | GGAGAACAAGAGAGGAAGGA |
| 11218 | GAGAACAAGAGAGGAAGGAG |
| 11219 | AGAACAAGAGAGGAAGGAGG |
| 11220 | GAACAAGAGAGGAAGGAGGA |
| 11221 | AACAAGAGAGGAAGGAGGAA |
| 11222 | ACAAGAGAGGAAGGAGGAAG |
| 11223 | CAAGAGAGGAAGGAGGAAGA |
| 11224 | AAGAGAGGAAGGAGGAAGAG |
| 11225 | AGAGAGGAAGGAGGAAGAGG |
| 11226 | GAGAGGAAGGAGGAAGAGGG |
| 11227 | AGAGGAAGGAGGAAGAGGGG |
| 11228 | GAGGAAGGAGGAAGAGGGGT |
| 11229 | AGGAAGGAGGAAGAGGGGTC |
| 11230 | GGAAGGAGGAAGAGGGGTCA |
| 11231 | GAAGGAGGAAGAGGGGTCAG |
| 11232 | AAGGAGGAAGAGGGGTCAGG |
| 11233 | AGGAGGAAGAGGGGTCAGGG |
| 11234 | GGAGGAAGAGGGGTCAGGGA |
| 11235 | GAGGAAGAGGGGTCAGGGAC |
| 11236 | AGGAAGAGGGGTCAGGGACC |
| 11237 | GGAAGAGGGGTCAGGGACCT |
| 11238 | GAAGAGGGGTCAGGGACCTG |
| 11239 | AAGAGGGGTCAGGGACCTGG |
| 11240 | AGAGGGGTCAGGGACCTGGA |
| 11241 | GAGGGGTCAGGGACCTGGAG |
| 11242 | AGGGGTCAGGGACCTGGAGC |
| 11243 | GGGGTCAGGGACCTGGAGCA |
| 11244 | GGGTCAGGGACCTGGAGCAT |
| 11245 | GGTCAGGGACCTGGAGCATT |
| 11246 | GTCAGGGACCTGGAGCATTG |
| 11247 | TCAGGGACCTGGAGCATTGG |
| 11248 | CAGGGACCTGGAGCATTGGA |
| 11249 | AGGGACCTGGAGCATTGGAT |
| 11250 | GGGACCTGGAGCATTGGATT |
| 11251 | GGACCTGGAGCATTGGATTT |
| 11252 | GACCTGGAGCATTGGATTTG |
| 11253 | ACCTGGAGCATTGGATTTGT |
| 11254 | CCTGGAGCATTGGATTTGTA |
| 11255 | CTGGAGCATTGGATTTGTAA |
| 11256 | TGGAGCATTGGATTTGTAAG |
| 11257 | GGAGCATTGGATTTGTAAGA |
| 11258 | GAGCATTGGATTTGTAAGAT |
| 11259 | AGCATTGGATTTGTAAGATA |
| 11260 | GCATTGGATTTGTAAGATAC |
| 11261 | CATTGGATTTGTAAGATACA |
| 11262 | ATTGGATTTGTAAGATACAA |
| 11263 | TTGGATTTGTAAGATACAAG |
| 11264 | TGGATTTGTAAGATACAAGA |
| 11265 | GGATTTGTAAGATACAAGAG |
| 11266 | GATTTGTAAGATACAAGAGT |
| 11267 | ATTTGTAAGATACAAGAGTG |
| 11268 | TTTGTAAGATACAAGAGTGT |
| 11269 | TTGTAAGATACAAGAGTGTT |
| 11270 | TGTAAGATACAAGAGTGTTT |
| 11271 | GTAAGATACAAGAGTGTTTC |
| 11272 | TAAGATACAAGAGTGTTTCT |
| 11273 | AAGATACAAGAGTGTTTCTG |
| 11274 | AGATACAAGAGTGTTTCTGG |
| 11275 | GATACAAGAGTGTTTCTGGT |
| 11276 | ATACAAGAGTGTTTCTGGTC |
| 11277 | TACAAGAGTGTTTCTGGTCT |
| 11278 | ACAAGAGTGTTTCTGGTCTG |
| 11279 | CAAGAGTGTTTCTGGTCTGG |
| 11280 | AAGAGTGTTTCTGGTCTGGG |
| 11281 | AGAGTGTTTCTGGTCTGGGA |
| 11282 | GAGTGTTTCTGGTCTGGGAG |
| 11283 | AGTGTTTCTGGTCTGGGAGC |
| 11284 | GTGTTTCTGGTCTGGGAGCT |
| 11285 | TGTTTCTGGTCTGGGAGCTG |
| 11286 | GTTTCTGGTCTGGGAGCTGG |
| 11287 | TTTCTGGTCTGGGAGCTGGG |
| 11288 | TTCTGGTCTGGGAGCTGGGG |
| 11289 | TCTGGTCTGGGAGCTGGGGG |
| 11290 | CTGGTCTGGGAGCTGGGGGT |
| 11291 | TGGTCTGGGAGCTGGGGGTT |
| 11292 | GGTCTGGGAGCTGGGGGTTC |
| 11293 | GTCTGGGAGCTGGGGGTTCC |
| 11294 | TCTGGGAGCTGGGGGTTCCC |
| 11295 | CTGGGAGCTGGGGGTTCCCA |
| 11296 | TGGGAGCTGGGGGTTCCCAG |
| 11297 | GGGAGCTGGGGGTTCCCAGC |
| 11298 | GGAGCTGGGGGTTCCCAGCC |
| 11299 | GAGCTGGGGGTTCCCAGCCC |
| 11300 | AGCTGGGGGTTCCCAGCCCT |
| 11301 | GCTGGGGGTTCCCAGCCCTA |
| 11302 | CTGGGGGTTCCCAGCCCTAA |
| 11303 | TGGGGGTTCCCAGCCCTAAT |
| 11304 | GGGGGTTCCCAGCCCTAATT |
| 11305 | GGGGTTCCCAGCCCTAATTC |
| 11306 | GGGTTCCCAGCCCTAATTCC |
| 11307 | GGTTCCCAGCCCTAATTCCC |
| 11308 | GTTCCCAGCCCTAATTCCCA |
| 11309 | TTCCCAGCCCTAATTCCCAC |
| 11310 | TCCCAGCCCTAATTCCCACA |
| 11311 | CCCAGCCCTAATTCCCACAT |
| 11312 | CCAGCCCTAATTCCCACATA |
| 11313 | CAGCCCTAATTCCCACATAC |
| 11314 | AGCCCTAATTCCCACATACC |
| 11315 | GCCCTAATTCCCACATACCC |
| 11316 | CCCTAATTCCCACATACCCC |
| 11317 | CCTAATTCCCACATACCCCA |
| 11318 | CTAATTCCCACATACCCCAA |
| 11319 | TAATTCCCACATACCCCAAG |
| 11320 | AATTCCCACATACCCCAAGA |
| 11321 | ATTCCCACATACCCCAAGAC |
| 11322 | TTCCCACATACCCCAAGACA |
| 11323 | TCCCACATACCCCAAGACAT |
| 11324 | CCCACATACCCCAAGACATT |
| 11325 | CCACATACCCCAAGACATTG |
| 11326 | CACATACCCCAAGACATTGT |
| 11327 | ACATACCCCAAGACATTGTG |
| 11328 | CATACCCCAAGACATTGTGG |
| 11329 | ATACCCCAAGACATTGTGGA |
| 11330 | TACCCCAAGACATTGTGGAG |
| 11331 | ACCCCAAGACATTGTGGAGG |
| 11332 | CCCCAAGACATTGTGGAGGG |
| 11333 | CCCAAGACATTGTGGAGGGC |
| 11334 | CCAAGACATTGTGGAGGGCC |
| 11335 | CAAGACATTGTGGAGGGCCC |
| 11336 | AAGACATTGTGGAGGGCCCA |
| 11337 | AGACATTGTGGAGGGCCCAA |
| 11338 | GACATTGTGGAGGGCCCAAA |
| 11339 | ACATTGTGGAGGGCCCAAAT |
| 11340 | CATTGTGGAGGGCCCAAATC |
| 11341 | ATTGTGGAGGGCCCAAATCT |
| 11342 | TTGTGGAGGGCCCAAATCTA |
| 11343 | TGTGGAGGGCCCAAATCTAC |
| 11344 | GTGGAGGGCCCAAATCTACA |
| 11345 | TGGAGGGCCCAAATCTACAA |
| 11346 | GGAGGGCCCAAATCTACAAA |
| 11347 | GAGGGCCCAAATCTACAAAC |
| 11348 | AGGGCCCAAATCTACAAACA |
| 11349 | GGGCCCAAATCTACAAACAC |
| 11350 | GGCCCAAATCTACAAACACT |
| 11351 | GCCCAAATCTACAAACACTA |
| 11352 | CCCAAATCTACAAACACTAC |
| 11353 | CCAAATCTACAAACACTACT |
| 11354 | CAAATCTACAAACACTACTA |
| 11355 | AAATCTACAAACACTACTAC |
| 11356 | AATCTACAAACACTACTACC |
| 11357 | ATCTACAAACACTACTACCT |
| 11358 | TCTACAAACACTACTACCTG |
| 11359 | CTACAAACACTACTACCTGG |
| 11360 | TACAAACACTACTACCTGGC |
| 11361 | ACAAACACTACTACCTGGCA |
| 11362 | CAAACACTACTACCTGGCAC |
| 11363 | AAACACTACTACCTGGCACC |
| 11364 | AACACTACTACCTGGCACCC |
| 11365 | ACACTACTACCTGGCACCCC |
| 11366 | CACTACTACCTGGCACCCCC |
| 11367 | ACTACTACCTGGCACCCCCT |
| 11368 | CTACTACCTGGCACCCCCTC |
| 11369 | TACTACCTGGCACCCCCTCC |
| 11370 | ACTACCTGGCACCCCCTCCT |
| 11371 | CTACCTGGCACCCCCTCCTC |
| 11372 | TACCTGGCACCCCCTCCTCC |
| 11373 | ACCTGGCACCCCCTCCTCCA |
| 11374 | CCTGGCACCCCCTCCTCCAT |
| 11375 | CTGGCACCCCCTCCTCCATG |
| 11376 | TGGCACCCCCTCCTCCATGA |
| 11377 | GGCACCCCCTCCTCCATGAC |
| 11378 | GCACCCCCTCCTCCATGACA |
| 11379 | CACCCCCTCCTCCATGACAC |
| 11380 | ACCCCCTCCTCCATGACACC |
| 11381 | CCCCCTCCTCCATGACACCC |
| 11382 | CCCCTCCTCCATGACACCCT |
| 11383 | CCCTCCTCCATGACACCCTC |
| 11384 | CCTCCTCCATGACACCCTCC |
| 11385 | CTCCTCCATGACACCCTCCC |
| 11386 | TCCTCCATGACACCCTCCCC |
| 11387 | CCTCCATGACACCCTCCCCT |
| 11388 | CTCCATGACACCCTCCCCTA |
| 11389 | TCCATGACACCCTCCCCTAG |
| 11390 | CCATGACACCCTCCCCTAGA |
| 11391 | CATGACACCCTCCCCTAGAA |
| 11392 | ATGACACCCTCCCCTAGAAG |
| 11393 | TGACACCCTCCCCTAGAAGG |
| 11394 | GACACCCTCCCCTAGAAGGT |
| 11395 | ACACCCTCCCCTAGAAGGTT |
| 11396 | CACCCTCCCCTAGAAGGTTC |
| 11397 | ACCCTCCCCTAGAAGGTTCT |
| 11398 | CCCTCCCCTAGAAGGTTCTA |
| 11399 | CCTCCCCTAGAAGGTTCTAA |
| 11400 | CTCCCCTAGAAGGTTCTAAC |
| 11401 | TCCCCTAGAAGGTTCTAACC |
| 11402 | CCCCTAGAAGGTTCTAACCT |
| 11403 | CCCTAGAAGGTTCTAACCTT |
| 11404 | CCTAGAAGGTTCTAACCTTC |
| 11405 | CTAGAAGGTTCTAACCTTCA |
| 11406 | TAGAAGGTTCTAACCTTCAG |
| 11407 | AGAAGGTTCTAACCTTCAGG |
| 11408 | GAAGGTTCTAACCTTCAGGA |
| 11409 | AAGGTTCTAACCTTCAGGAT |
| 11410 | AGGTTCTAACCTTCAGGATG |
| 11411 | GGTTCTAACCTTCAGGATGG |
| 11412 | GTTCTAACCTTCAGGATGGC |
| 11413 | TTCTAACCTTCAGGATGGCA |
| 11414 | TCTAACCTTCAGGATGGCAC |
| 11415 | CTAACCTTCAGGATGGCACC |
| 11416 | TAACCTTCAGGATGGCACCC |
| 11417 | AACCTTCAGGATGGCACCCC |
| 11418 | ACCTTCAGGATGGCACCCCG |
| 11419 | CCTTCAGGATGGCACCCCGA |
| 11420 | CTTCAGGATGGCACCCCGAA |
| 11421 | TTCAGGATGGCACCCCGAAC |
| 11422 | TCAGGATGGCACCCCGAACC |
| 11423 | CAGGATGGCACCCCGAACCC |
| 11424 | AGGATGGCACCCCGAACCCC |
| 11425 | GGATGGCACCCCGAACCCCA |
| 11426 | GATGGCACCCCGAACCCCAT |
| 11427 | ATGGCACCCCGAACCCCATT |
| 11428 | TGGCACCCCGAACCCCATTT |
| 11429 | GGCACCCCGAACCCCATTTC |
| 11430 | GCACCCCGAACCCCATTTCT |
| 11431 | CACCCCGAACCCCATTTCTA |
| 11432 | ACCCCGAACCCCATTTCTAC |
| 11433 | CCCCGAACCCCATTTCTACC |
| 11434 | CCCGAACCCCATTTCTACCT |
| 11435 | CCGAACCCCATTTCTACCTT |
| 11436 | CGAACCCCATTTCTACCTTC |
| 11437 | GAACCCCATTTCTACCTTCT |
| 11438 | AACCCCATTTCTACCTTCTC |
| 11439 | ACCCCATTTCTACCTTCTCC |
| 11440 | CCCCATTTCTACCTTCTCCA |
| 11441 | CCCATTTCTACCTTCTCCAG |
| 11442 | CCATTTCTACCTTCTCCAGC |
| 11443 | CATTTCTACCTTCTCCAGCA |
| 11444 | ATTTCTACCTTCTCCAGCAC |
| 11445 | TTTCTACCTTCTCCAGCACC |
| 11446 | TTCTACCTTCTCCAGCACCC |
| 11447 | TCTACCTTCTCCAGCACCCC |
| 11448 | CTACCTTCTCCAGCACCCCT |
| 11449 | TACCTTCTCCAGCACCCCTG |
| 11450 | ACCTTCTCCAGCACCCCTGC |
| 11451 | CCTTCTCCAGCACCCCTGCA |
| 11452 | CTTCTCCAGCACCCCTGCAG |
| 11453 | TTCTCCAGCACCCCTGCAGC |
| 11454 | TCTCCAGCACCCCTGCAGCT |
| 11455 | CTCCAGCACCCCTGCAGCTC |
| 11456 | TCCAGCACCCCTGCAGCTCA |
| 11457 | CCAGCACCCCTGCAGCTCAA |
| 11458 | CAGCACCCCTGCAGCTCAAG |
| 11459 | AGCACCCCTGCAGCTCAAGT |
| 11460 | GCACCCCTGCAGCTCAAGTC |
| 11461 | CACCCCTGCAGCTCAAGTCC |
| 11462 | ACCCCTGCAGCTCAAGTCCC |
| 11463 | CCCCTGCAGCTCAAGTCCCT |
| 11464 | CCCTGCAGCTCAAGTCCCTC |
| 11465 | CCTGCAGCTCAAGTCCCTCA |
| 11466 | CTGCAGCTCAAGTCCCTCAA |
| 11467 | TGCAGCTCAAGTCCCTCAAG |
| 11468 | GCAGCTCAAGTCCCTCAAGA |
| 11469 | CAGCTCAAGTCCCTCAAGAC |
| 11470 | AGCTCAAGTCCCTCAAGACC |
| 11471 | GCTCAAGTCCCTCAAGACCT |
| 11472 | CTCAAGTCCCTCAAGACCTC |
| 11473 | TCAAGTCCCTCAAGACCTCT |
| 11474 | CAAGTCCCTCAAGACCTCTT |
| 11475 | AAGTCCCTCAAGACCTCTTT |
| 11476 | AGTCCCTCAAGACCTCTTTC |
| 11477 | GTCCCTCAAGACCTCTTTCT |
| 11478 | TCCCTCAAGACCTCTTTCTC |
| 11479 | CCCTCAAGACCTCTTTCTCC |
| 11480 | CCTCAAGACCTCTTTCTCCA |
| 11481 | CTCAAGACCTCTTTCTCCAC |
| 11482 | TCAAGACCTCTTTCTCCACC |
| 11483 | CAAGACCTCTTTCTCCACCT |
| 11484 | AAGACCTCTTTCTCCACCTC |
| 11485 | AGACCTCTTTCTCCACCTCT |
| 11486 | GACCTCTTTCTCCACCTCTG |
| 11487 | ACCTCTTTCTCCACCTCTGT |
| 11488 | CCTCTTTCTCCACCTCTGTT |
| 11489 | CTCTTTCTCCACCTCTGTTC |
| 11490 | TCTTTCTCCACCTCTGTTCC |
| 11491 | CTTTCTCCACCTCTGTTCCA |
| 11492 | TTTCTCCACCTCTGTTCCAA |
| 11493 | TTCTCCACCTCTGTTCCAAT |
| 11494 | TCTCCACCTCTGTTCCAATC |
| 11495 | CTCCACCTCTGTTCCAATCA |
| 11496 | TCCACCTCTGTTCCAATCAG |
| 11497 | CCACCTCTGTTCCAATCAGT |
| 11498 | CACCTCTGTTCCAATCAGTG |
| 11499 | ACCTCTGTTCCAATCAGTGA |
| 11500 | CCTCTGTTCCAATCAGTGAT |
| 11501 | CTCTGTTCCAATCAGTGATC |
| 11502 | TCTGTTCCAATCAGTGATCA |
| 11503 | CTGTTCCAATCAGTGATCAG |
| 11504 | TGTTCCAATCAGTGATCAGC |
| 11505 | GTTCCAATCAGTGATCAGCA |
| 11506 | TTCCAATCAGTGATCAGCAG |
| 11507 | TCCAATCAGTGATCAGCAGG |
| 11508 | CCAATCAGTGATCAGCAGGG |
| 11509 | CAATCAGTGATCAGCAGGGC |
| 11510 | AATCAGTGATCAGCAGGGCT |
| 11511 | ATCAGTGATCAGCAGGGCTT |
| 11512 | TCAGTGATCAGCAGGGCTTC |
| 11513 | CAGTGATCAGCAGGGCTTCA |
| 11514 | AGTGATCAGCAGGGCTTCAG |
| 11515 | GTGATCAGCAGGGCTTCAGG |
| 11516 | TGATCAGCAGGGCTTCAGGG |
| 11517 | GATCAGCAGGGCTTCAGGGA |
| 11518 | ATCAGCAGGGCTTCAGGGAC |
| 11519 | TCAGCAGGGCTTCAGGGACA |
| 11520 | CAGCAGGGCTTCAGGGACAG |
| 11521 | AGCAGGGCTTCAGGGACAGC |
| 11522 | GCAGGGCTTCAGGGACAGCC |
| 11523 | CAGGGCTTCAGGGACAGCCC |
| 11524 | AGGGCTTCAGGGACAGCCCA |
| 11525 | GGGCTTCAGGGACAGCCCAC |
| 11526 | GGCTTCAGGGACAGCCCACT |
| 11527 | GCTTCAGGGACAGCCCACTG |
| 11528 | CTTCAGGGACAGCCCACTGG |
| 11529 | TTCAGGGACAGCCCACTGGC |
| 11530 | TCAGGGACAGCCCACTGGCT |
| 11531 | CAGGGACAGCCCACTGGCTT |
| 11532 | AGGGACAGCCCACTGGCTTG |
| 11533 | GGGACAGCCCACTGGCTTGC |
| 11534 | GGACAGCCCACTGGCTTGCA |
| 11535 | GACAGCCCACTGGCTTGCAG |
| 11536 | ACAGCCCACTGGCTTGCAGA |
| 11537 | CAGCCCACTGGCTTGCAGAG |
| 11538 | AGCCCACTGGCTTGCAGAGG |
| 11539 | GCCCACTGGCTTGCAGAGGA |
| 11540 | CCCACTGGCTTGCAGAGGAG |
| 11541 | CCACTGGCTTGCAGAGGAGA |
| 11542 | CACTGGCTTGCAGAGGAGAA |
| 11543 | ACTGGCTTGCAGAGGAGAAG |
| 11544 | CTGGCTTGCAGAGGAGAAGG |
| 11545 | TGGCTTGCAGAGGAGAAGGG |
| 11546 | GGCTTGCAGAGGAGAAGGGT |
| 11547 | GCTTGCAGAGGAGAAGGGTT |
| 11548 | CTTGCAGAGGAGAAGGGTTG |
| 11549 | TTGCAGAGGAGAAGGGTTGG |
| 11550 | TGCAGAGGAGAAGGGTTGGG |
| 11551 | GCAGAGGAGAAGGGTTGGGT |
| 11552 | CAGAGGAGAAGGGTTGGGTG |
| 11553 | AGAGGAGAAGGGTTGGGTGG |
| 11554 | GAGGAGAAGGGTTGGGTGGC |
| 11555 | AGGAGAAGGGTTGGGTGGCC |
| 11556 | GGAGAAGGGTTGGGTGGCCT |
| 11557 | GAGAAGGGTTGGGTGGCCTG |
| 11558 | AGAAGGGTTGGGTGGCCTGG |
| 11559 | GAAGGGTTGGGTGGCCTGGC |
| 11560 | AAGGGTTGGGTGGCCTGGCT |
| 11561 | AGGGTTGGGTGGCCTGGCTG |
| 11562 | GGGTTGGGTGGCCTGGCTGG |
| 11563 | GGTTGGGTGGCCTGGCTGGG |
| 11564 | GTTGGGTGGCCTGGCTGGGC |
| 11565 | TTGGGTGGCCTGGCTGGGCC |
| 11566 | TGGGTGGCCTGGCTGGGCCA |
| 11567 | GGGTGGCCTGGCTGGGCCAG |
| 11568 | GGTGGCCTGGCTGGGCCAGG |
| 11569 | GTGGCCTGGCTGGGCCAGGT |
| 11570 | TGGCCTGGCTGGGCCAGGTC |
| 11571 | GGCCTGGCTGGGCCAGGTCA |
| 11572 | GCCTGGCTGGGCCAGGTCAG |
| 11573 | CCTGGCTGGGCCAGGTCAGG |
| 11574 | CTGGCTGGGCCAGGTCAGGG |
| 11575 | TGGCTGGGCCAGGTCAGGGC |
| 11576 | GGCTGGGCCAGGTCAGGGCT |
| 11577 | GCTGGGCCAGGTCAGGGCTG |
| 11578 | CTGGGCCAGGTCAGGGCTGA |
| 11579 | TGGGCCAGGTCAGGGCTGAG |
| 11580 | GGGCCAGGTCAGGGCTGAGG |
| 11581 | GGCCAGGTCAGGGCTGAGGA |
| 11582 | GCCAGGTCAGGGCTGAGGAA |
| 11583 | CCAGGTCAGGGCTGAGGAAG |
| 11584 | CAGGTCAGGGCTGAGGAAGG |
| 11585 | AGGTCAGGGCTGAGGAAGGA |
| 11586 | GGTCAGGGCTGAGGAAGGAG |
| 11587 | GTCAGGGCTGAGGAAGGAGG |
| 11588 | TCAGGGCTGAGGAAGGAGGT |
| 11589 | CAGGGCTGAGGAAGGAGGTG |
| 11590 | AGGGCTGAGGAAGGAGGTGC |
| 11591 | GGGCTGAGGAAGGAGGTGCT |
| 11592 | GGCTGAGGAAGGAGGTGCTC |
| 11593 | GCTGAGGAAGGAGGTGCTCC |
| 11594 | CTGAGGAAGGAGGTGCTCCC |
| 11595 | TGAGGAAGGAGGTGCTCCCA |
| 11596 | GAGGAAGGAGGTGCTCCCAT |
| 11597 | AGGAAGGAGGTGCTCCCATC |
| 11598 | GGAAGGAGGTGCTCCCATCA |
| 11599 | GAAGGAGGTGCTCCCATCAG |
| 11600 | AAGGAGGTGCTCCCATCAGC |
| 11601 | AGGAGGTGCTCCCATCAGCT |
| 11602 | GGAGGTGCTCCCATCAGCTT |
| 11603 | GAGGTGCTCCCATCAGCTTT |
| 11604 | AGGTGCTCCCATCAGCTTTG |
| 11605 | GGTGCTCCCATCAGCTTTGA |
| 11606 | GTGCTCCCATCAGCTTTGAC |
| 11607 | TGCTCCCATCAGCTTTGACC |
| 11608 | GCTCCCATCAGCTTTGACCC |
| 11609 | CTCCCATCAGCTTTGACCCA |
| 11610 | TCCCATCAGCTTTGACCCAG |
| 11611 | CCCATCAGCTTTGACCCAGA |
| 11612 | CCATCAGCTTTGACCCAGAG |
| 11613 | CATCAGCTTTGACCCAGAGA |
| 11614 | ATCAGCTTTGACCCAGAGAC |
| 11615 | TCAGCTTTGACCCAGAGACT |
| 11616 | CAGCTTTGACCCAGAGACTG |
| 11617 | AGCTTTGACCCAGAGACTGG |
| 11618 | GCTTTGACCCAGAGACTGGT |
| 11619 | CTTTGACCCAGAGACTGGTG |
| 11620 | TTTGACCCAGAGACTGGTGA |
| 11621 | TTGACCCAGAGACTGGTGAG |
| 11622 | TGACCCAGAGACTGGTGAGC |
| 11623 | GACCCAGAGACTGGTGAGCC |
| 11624 | ACCCAGAGACTGGTGAGCCC |
| 11625 | CCCAGAGACTGGTGAGCCCT |
| 11626 | CCAGAGACTGGTGAGCCCTC |
| 11627 | CAGAGACTGGTGAGCCCTCA |
| 11628 | AGAGACTGGTGAGCCCTCAG |
| 11629 | GAGACTGGTGAGCCCTCAGG |
| 11630 | AGACTGGTGAGCCCTCAGGG |
| 11631 | GACTGGTGAGCCCTCAGGGA |
| 11632 | ACTGGTGAGCCCTCAGGGAC |
| 11633 | CTGGTGAGCCCTCAGGGACT |
| 11634 | TGGTGAGCCCTCAGGGACTC |
| 11635 | GGTGAGCCCTCAGGGACTCC |
| 11636 | GTGAGCCCTCAGGGACTCCA |
| 11637 | TGAGCCCTCAGGGACTCCAG |
| 11638 | GAGCCCTCAGGGACTCCAGG |
| 11639 | AGCCCTCAGGGACTCCAGGC |
| 11640 | GCCCTCAGGGACTCCAGGCC |
| 11641 | CCCTCAGGGACTCCAGGCCA |
| 11642 | CCTCAGGGACTCCAGGCCAG |
| 11643 | CTCAGGGACTCCAGGCCAGG |
| 11644 | TCAGGGACTCCAGGCCAGGA |
| 11645 | CAGGGACTCCAGGCCAGGAC |
| 11646 | AGGGACTCCAGGCCAGGACA |
| 11647 | GGGACTCCAGGCCAGGACAT |
| 11648 | GGACTCCAGGCCAGGACATC |
| 11649 | GACTCCAGGCCAGGACATCT |
| 11650 | ACTCCAGGCCAGGACATCTT |
| 11651 | CTCCAGGCCAGGACATCTTC |
| 11652 | TCCAGGCCAGGACATCTTCT |
| 11653 | CCAGGCCAGGACATCTTCTC |
| 11654 | CAGGCCAGGACATCTTCTCC |
| 11655 | AGGCCAGGACATCTTCTCCT |
| 11656 | GGCCAGGACATCTTCTCCTT |
| 11657 | GCCAGGACATCTTCTCCTTA |
| 11658 | CCAGGACATCTTCTCCTTAA |
| 11659 | CAGGACATCTTCTCCTTAAG |
| 11660 | AGGACATCTTCTCCTTAAGG |
| 11661 | GGACATCTTCTCCTTAAGGT |
| 11662 | GACATCTTCTCCTTAAGGTG |
| 11663 | ACATCTTCTCCTTAAGGTGG |
| 11664 | CATCTTCTCCTTAAGGTGGA |
| 11665 | ATCTTCTCCTTAAGGTGGAC |
| 11666 | TCTTCTCCTTAAGGTGGACC |
| 11667 | CTTCTCCTTAAGGTGGACCT |
| 11668 | TTCTCCTTAAGGTGGACCTG |
| 11669 | TCTCCTTAAGGTGGACCTGA |
| 11670 | CTCCTTAAGGTGGACCTGAC |
| 11671 | TCCTTAAGGTGGACCTGACA |
| 11672 | CCTTAAGGTGGACCTGACAA |
| 11673 | CTTAAGGTGGACCTGACAAG |
| 11674 | TTAAGGTGGACCTGACAAGG |
| 11675 | TAAGGTGGACCTGACAAGGA |
| 11676 | AAGGTGGACCTGACAAGGAG |
| 11677 | AGGTGGACCTGACAAGGAGA |
| 11678 | GGTGGACCTGACAAGGAGAG |
| 11679 | GTGGACCTGACAAGGAGAGG |
| 11680 | TGGACCTGACAAGGAGAGGA |
| 11681 | GGACCTGACAAGGAGAGGAC |
| 11682 | GACCTGACAAGGAGAGGACC |
| 11683 | ACCTGACAAGGAGAGGACCA |
| 11684 | CCTGACAAGGAGAGGACCAG |
| 11685 | CTGACAAGGAGAGGACCAGC |
| 11686 | TGACAAGGAGAGGACCAGCA |
| 11687 | GACAAGGAGAGGACCAGCAA |
| 11688 | ACAAGGAGAGGACCAGCAAT |
| 11689 | CAAGGAGAGGACCAGCAATG |
| 11690 | AAGGAGAGGACCAGCAATGG |
| 11691 | AGGAGAGGACCAGCAATGGC |
| 11692 | GGAGAGGACCAGCAATGGCA |
| 11693 | GAGAGGACCAGCAATGGCAA |
| 11694 | AGAGGACCAGCAATGGCAAG |
| 11695 | GAGGACCAGCAATGGCAAGT |
| 11696 | AGGACCAGCAATGGCAAGTG |
| 11697 | GGACCAGCAATGGCAAGTGG |
| 11698 | GACCAGCAATGGCAAGTGGC |
| 11699 | ACCAGCAATGGCAAGTGGCG |
| 11700 | CCAGCAATGGCAAGTGGCGG |
| 11701 | CAGCAATGGCAAGTGGCGGG |
| 11702 | AGCAATGGCAAGTGGCGGGG |
| 11703 | GCAATGGCAAGTGGCGGGGT |
| 11704 | CAATGGCAAGTGGCGGGGTA |
| 11705 | AATGGCAAGTGGCGGGGTAG |
| 11706 | ATGGCAAGTGGCGGGGTAGG |
| 11707 | TGGCAAGTGGCGGGGTAGGG |
| 11708 | GGCAAGTGGCGGGGTAGGGG |
| 11709 | GCAAGTGGCGGGGTAGGGGT |
| 11710 | CAAGTGGCGGGGTAGGGGTG |
| 11711 | AAGTGGCGGGGTAGGGGTGG |
| 11712 | AGTGGCGGGGTAGGGGTGGC |
| 11713 | GTGGCGGGGTAGGGGTGGCC |
| 11714 | TGGCGGGGTAGGGGTGGCCA |
| 11715 | GGCGGGGTAGGGGTGGCCAC |
| 11716 | GCGGGGTAGGGGTGGCCACC |
| 11717 | CGGGGTAGGGGTGGCCACCG |
| 11718 | GGGGTAGGGGTGGCCACCGG |
| 11719 | GGGTAGGGGTGGCCACCGGA |
| 11720 | GGTAGGGGTGGCCACCGGAG |
| 11721 | GTAGGGGTGGCCACCGGAGA |
| 11722 | TAGGGGTGGCCACCGGAGAG |
| 11723 | AGGGGTGGCCACCGGAGAGC |
| 11724 | GGGGTGGCCACCGGAGAGCA |
| 11725 | GGGTGGCCACCGGAGAGCAT |
| 11726 | GGTGGCCACCGGAGAGCATC |
| 11727 | GTGGCCACCGGAGAGCATCG |
| 11728 | TGGCCACCGGAGAGCATCGA |
| 11729 | GGCCACCGGAGAGCATCGAG |
| 11730 | GCCACCGGAGAGCATCGAGG |
| 11731 | CCACCGGAGAGCATCGAGGG |
| 11732 | CACCGGAGAGCATCGAGGGG |
| 11733 | ACCGGAGAGCATCGAGGGGC |
| 11734 | CCGGAGAGCATCGAGGGGCA |
| 11735 | CGGAGAGCATCGAGGGGCAG |
| 11736 | GGAGAGCATCGAGGGGCAGA |
| 11737 | GAGAGCATCGAGGGGCAGAC |
| 11738 | AGAGCATCGAGGGGCAGACA |
| 11739 | GAGCATCGAGGGGCAGACAC |
| 11740 | AGCATCGAGGGGCAGACACT |
| 11741 | GCATCGAGGGGCAGACACTC |
| 11742 | CATCGAGGGGCAGACACTCA |
| 11743 | ATCGAGGGGCAGACACTCAC |
| 11744 | TCGAGGGGCAGACACTCACG |
| 11745 | CGAGGGGCAGACACTCACGG |
| 11746 | GAGGGGCAGACACTCACGGT |
| 11747 | AGGGGCAGACACTCACGGTG |
| 11748 | GGGGCAGACACTCACGGTGC |
| 11749 | GGGCAGACACTCACGGTGCA |
| 11750 | GGCAGACACTCACGGTGCAG |
| 11751 | GCAGACACTCACGGTGCAGG |
| 11752 | CAGACACTCACGGTGCAGGC |
| 11753 | AGACACTCACGGTGCAGGCG |
| 11754 | GACACTCACGGTGCAGGCGG |
| 11755 | ACACTCACGGTGCAGGCGGC |
| 11756 | CACTCACGGTGCAGGCGGCT |
| 11757 | ACTCACGGTGCAGGCGGCTG |
| 11758 | CTCACGGTGCAGGCGGCTGA |
| 11759 | TCACGGTGCAGGCGGCTGAC |
| 11760 | CACGGTGCAGGCGGCTGACA |
| 11761 | ACGGTGCAGGCGGCTGACAT |
| 11762 | CGGTGCAGGCGGCTGACATT |
| 11763 | GGTGCAGGCGGCTGACATTG |
| 11764 | GTGCAGGCGGCTGACATTGT |
| 11765 | TGCAGGCGGCTGACATTGTG |
| 11766 | GCAGGCGGCTGACATTGTGA |
| 11767 | CAGGCGGCTGACATTGTGAG |
| 11768 | AGGCGGCTGACATTGTGAGC |
| 11769 | GGCGGCTGACATTGTGAGCC |
| 11770 | GCGGCTGACATTGTGAGCCG |
| 11771 | CGGCTGACATTGTGAGCCGG |
| 11772 | GGCTGACATTGTGAGCCGGG |
| 11773 | GCTGACATTGTGAGCCGGGT |
| 11774 | CTGACATTGTGAGCCGGGTC |
| 11775 | TGACATTGTGAGCCGGGTCA |
| 11776 | GACATTGTGAGCCGGGTCAA |
| 11777 | ACATTGTGAGCCGGGTCAAC |
| 11778 | CATTGTGAGCCGGGTCAACT |
| 11779 | ATTGTGAGCCGGGTCAACTG |
| 11780 | TTGTGAGCCGGGTCAACTGG |
| 11781 | TGTGAGCCGGGTCAACTGGC |
| 11782 | GTGAGCCGGGTCAACTGGCT |
| 11783 | TGAGCCGGGTCAACTGGCTG |
| 11784 | GAGCCGGGTCAACTGGCTGG |
| 11785 | AGCCGGGTCAACTGGCTGGG |
| 11786 | GCCGGGTCAACTGGCTGGGC |
| 11787 | CCGGGTCAACTGGCTGGGCC |
| 11788 | CGGGTCAACTGGCTGGGCCA |
| 11789 | GGGTCAACTGGCTGGGCCAT |
| 11790 | GGTCAACTGGCTGGGCCATC |
| 11791 | GTCAACTGGCTGGGCCATCT |
| 11792 | TCAACTGGCTGGGCCATCTC |
| 11793 | CAACTGGCTGGGCCATCTCG |
| 11794 | AACTGGCTGGGCCATCTCGG |
| 11795 | ACTGGCTGGGCCATCTCGGG |
| 11796 | CTGGCTGGGCCATCTCGGGC |
| 11797 | TGGCTGGGCCATCTCGGGCA |
| 11798 | GGCTGGGCCATCTCGGGCAG |
| 11799 | GCTGGGCCATCTCGGGCAGC |
| 11800 | CTGGGCCATCTCGGGCAGCC |
| 11801 | TGGGCCATCTCGGGCAGCCT |
| 11802 | GGGCCATCTCGGGCAGCCTC |
| 11803 | GGCCATCTCGGGCAGCCTCT |
| 11804 | GCCATCTCGGGCAGCCTCTT |
| 11805 | CCATCTCGGGCAGCCTCTTT |
| 11806 | CATCTCGGGCAGCCTCTTTC |
| 11807 | ATCTCGGGCAGCCTCTTTCT |
| 11808 | TCTCGGGCAGCCTCTTTCTT |
| 11809 | CTCGGGCAGCCTCTTTCTTC |
| 11810 | TCGGGCAGCCTCTTTCTTCG |
| 11811 | CGGGCAGCCTCTTTCTTCGG |
| 11812 | GGGCAGCCTCTTTCTTCGGG |
| 11813 | GGCAGCCTCTTTCTTCGGGC |
| 11814 | GCAGCCTCTTTCTTCGGGCA |
| 11815 | CAGCCTCTTTCTTCGGGCAG |
| 11816 | AGCCTCTTTCTTCGGGCAGG |
| 11817 | GCCTCTTTCTTCGGGCAGGC |
| 11818 | CCTCTTTCTTCGGGCAGGCT |
| 11819 | CTCTTTCTTCGGGCAGGCTT |
| 11820 | TCTTTCTTCGGGCAGGCTTG |
| 11821 | CTTTCTTCGGGCAGGCTTGG |
| 11822 | TTTCTTCGGGCAGGCTTGGC |
| 11823 | TTCTTCGGGCAGGCTTGGCC |
| 11824 | TCTTCGGGCAGGCTTGGCCA |
| 11825 | CTTCGGGCAGGCTTGGCCAC |
| 11826 | TTCGGGCAGGCTTGGCCACC |
| 11827 | TCGGGCAGGCTTGGCCACCT |
| 11828 | CGGGCAGGCTTGGCCACCTC |
| 11829 | GGGCAGGCTTGGCCACCTCA |
| 11830 | GGCAGGCTTGGCCACCTCAT |
| 11831 | GCAGGCTTGGCCACCTCATG |
| 11832 | CAGGCTTGGCCACCTCATGG |
| 11833 | AGGCTTGGCCACCTCATGGT |
| 11834 | GGCTTGGCCACCTCATGGTC |
| 11835 | GCTTGGCCACCTCATGGTCT |
| 11836 | CTTGGCCACCTCATGGTCTA |
| 11837 | TTGGCCACCTCATGGTCTAG |
| 11838 | TGGCCACCTCATGGTCTAGG |
| 11839 | GGCCACCTCATGGTCTAGGT |
| 11840 | GCCACCTCATGGTCTAGGTG |
| 11841 | CCACCTCATGGTCTAGGTGC |
| 11842 | CACCTCATGGTCTAGGTGCT |
| 11843 | ACCTCATGGTCTAGGTGCTT |
| 11844 | CCTCATGGTCTAGGTGCTTG |
| 11845 | CTCATGGTCTAGGTGCTTGT |
| 11846 | TCATGGTCTAGGTGCTTGTG |
| 11847 | CATGGTCTAGGTGCTTGTGG |
| 11848 | ATGGTCTAGGTGCTTGTGGT |
| 11849 | TGGTCTAGGTGCTTGTGGTC |
| 11850 | GGTCTAGGTGCTTGTGGTCC |
| 11851 | GTCTAGGTGCTTGTGGTCCA |
| 11852 | TCTAGGTGCTTGTGGTCCAG |
| 11853 | CTAGGTGCTTGTGGTCCAGG |
| 11854 | TAGGTGCTTGTGGTCCAGGA |
| 11855 | AGGTGCTTGTGGTCCAGGAG |
| 11856 | GGTGCTTGTGGTCCAGGAGG |
| 11857 | GTGCTTGTGGTCCAGGAGGC |
| 11858 | TGCTTGTGGTCCAGGAGGCC |
| 11859 | GCTTGTGGTCCAGGAGGCCA |
| 11860 | CTTGTGGTCCAGGAGGCCAA |
| 11861 | TTGTGGTCCAGGAGGCCAAA |
| 11862 | TGTGGTCCAGGAGGCCAAAC |
| 11863 | GTGGTCCAGGAGGCCAAACT |
| 11864 | TGGTCCAGGAGGCCAAACTA |
| 11865 | GGTCCAGGAGGCCAAACTAG |
| 11866 | GTCCAGGAGGCCAAACTAGG |
| 11867 | TCCAGGAGGCCAAACTAGGA |
| 11868 | CCAGGAGGCCAAACTAGGAT |
| 11869 | CAGGAGGCCAAACTAGGATG |
| 11870 | AGGAGGCCAAACTAGGATGG |
| 11871 | GGAGGCCAAACTAGGATGGG |
| 11872 | GAGGCCAAACTAGGATGGGA |
| 11873 | AGGCCAAACTAGGATGGGAC |
| 11874 | GGCCAAACTAGGATGGGACG |
| 11875 | GCCAAACTAGGATGGGACGG |
| 11876 | CCAAACTAGGATGGGACGGG |
| 11877 | CAAACTAGGATGGGACGGGA |
| 11878 | AAACTAGGATGGGACGGGAG |
| 11879 | AACTAGGATGGGACGGGAGG |
| 11880 | ACTAGGATGGGACGGGAGGA |
| 11881 | CTAGGATGGGACGGGAGGAG |
| 11882 | TAGGATGGGACGGGAGGAGG |
| 11883 | AGGATGGGACGGGAGGAGGG |
| 11884 | GGATGGGACGGGAGGAGGGT |
| 11885 | GATGGGACGGGAGGAGGGTG |
| 11886 | ATGGGACGGGAGGAGGGTGT |
| 11887 | TGGGACGGGAGGAGGGTGTC |
| 11888 | GGGACGGGAGGAGGGTGTCA |
| 11889 | GGACGGGAGGAGGGTGTCAG |
| 11890 | GACGGGAGGAGGGTGTCAGG |
| 11891 | ACGGGAGGAGGGTGTCAGGT |
| 11892 | CGGGAGGAGGGTGTCAGGTC |
| 11893 | GGGAGGAGGGTGTCAGGTCC |
| 11894 | GGAGGAGGGTGTCAGGTCCT |
| 11895 | GAGGAGGGTGTCAGGTCCTG |
| 11896 | AGGAGGGTGTCAGGTCCTGC |
| 11897 | GGAGGGTGTCAGGTCCTGCC |
| 11898 | GAGGGTGTCAGGTCCTGCCT |
| 11899 | AGGGTGTCAGGTCCTGCCTG |
| 11900 | GGGTGTCAGGTCCTGCCTGG |
| 11901 | GGTGTCAGGTCCTGCCTGGC |
| 11902 | GTGTCAGGTCCTGCCTGGCC |
| 11903 | TGTCAGGTCCTGCCTGGCCC |
| 11904 | GTCAGGTCCTGCCTGGCCCC |
| 11905 | TCAGGTCCTGCCTGGCCCCA |
| 11906 | CAGGTCCTGCCTGGCCCCAC |
| 11907 | AGGTCCTGCCTGGCCCCACG |
| 11908 | GGTCCTGCCTGGCCCCACGT |
| 11909 | GTCCTGCCTGGCCCCACGTC |
| 11910 | TCCTGCCTGGCCCCACGTCC |
| 11911 | CCTGCCTGGCCCCACGTCCC |
| 11912 | CTGCCTGGCCCCACGTCCCC |
| 11913 | TGCCTGGCCCCACGTCCCCA |
| 11914 | GCCTGGCCCCACGTCCCCAG |
| 11915 | CCTGGCCCCACGTCCCCAGC |
| 11916 | CTGGCCCCACGTCCCCAGCC |
| 11917 | TGGCCCCACGTCCCCAGCCA |
| 11918 | GGCCCCACGTCCCCAGCCAC |
| 11919 | GCCCCACGTCCCCAGCCACA |
| 11920 | CCCCACGTCCCCAGCCACAC |
| 11921 | CCCACGTCCCCAGCCACACG |
| 11922 | CCACGTCCCCAGCCACACGT |
| 11923 | CACGTCCCCAGCCACACGTC |
| 11924 | ACGTCCCCAGCCACACGTCC |
| 11925 | CGTCCCCAGCCACACGTCCA |
| 11926 | GTCCCCAGCCACACGTCCAG |
| 11927 | TCCCCAGCCACACGTCCAGT |
| 11928 | CCCCAGCCACACGTCCAGTT |
| 11929 | CCCAGCCACACGTCCAGTTC |
| 11930 | CCAGCCACACGTCCAGTTCT |
| 11931 | CAGCCACACGTCCAGTTCTC |
| 11932 | AGCCACACGTCCAGTTCTCA |
| 11933 | GCCACACGTCCAGTTCTCAC |
| 11934 | CCACACGTCCAGTTCTCACC |
| 11935 | CACACGTCCAGTTCTCACCA |
| 11936 | ACACGTCCAGTTCTCACCAC |
| 11937 | CACGTCCAGTTCTCACCACC |
| 11938 | ACGTCCAGTTCTCACCACCT |
| 11939 | CGTCCAGTTCTCACCACCTC |
| 11940 | GTCCAGTTCTCACCACCTCC |
| 11941 | TCCAGTTCTCACCACCTCCC |
| 11942 | CCAGTTCTCACCACCTCCCT |
| 11943 | CAGTTCTCACCACCTCCCTC |
| 11944 | AGTTCTCACCACCTCCCTCT |
| 11945 | GTTCTCACCACCTCCCTCTC |
| 11946 | TTCTCACCACCTCCCTCTCA |
| 11947 | TCTCACCACCTCCCTCTCAA |
| 11948 | CTCACCACCTCCCTCTCAAC |
| 11949 | TCACCACCTCCCTCTCAACC |
| 11950 | CACCACCTCCCTCTCAACCT |
| 11951 | ACCACCTCCCTCTCAACCTG |
| 11952 | CCACCTCCCTCTCAACCTGG |
| 11953 | CACCTCCCTCTCAACCTGGG |
| 11954 | ACCTCCCTCTCAACCTGGGG |
| 11955 | CCTCCCTCTCAACCTGGGGT |
| 11956 | CTCCCTCTCAACCTGGGGTC |
| 11957 | TCCCTCTCAACCTGGGGTCC |
| 11958 | CCCTCTCAACCTGGGGTCCA |
| 11959 | CCTCTCAACCTGGGGTCCAG |
| 11960 | CTCTCAACCTGGGGTCCAGC |
| 11961 | TCTCAACCTGGGGTCCAGCT |
| 11962 | CTCAACCTGGGGTCCAGCTA |
| 11963 | TCAACCTGGGGTCCAGCTAT |
| 11964 | CAACCTGGGGTCCAGCTATC |
| 11965 | AACCTGGGGTCCAGCTATCA |
| 11966 | ACCTGGGGTCCAGCTATCAG |
| 11967 | CCTGGGGTCCAGCTATCAGA |
| 11968 | CTGGGGTCCAGCTATCAGAG |
| 11969 | TGGGGTCCAGCTATCAGAGG |
| 11970 | GGGGTCCAGCTATCAGAGGG |
| 11971 | GGGTCCAGCTATCAGAGGGA |
| 11972 | GGTCCAGCTATCAGAGGGAC |
| 11973 | GTCCAGCTATCAGAGGGACC |
| 11974 | TCCAGCTATCAGAGGGACCT |
| 11975 | CCAGCTATCAGAGGGACCTT |
| 11976 | CAGCTATCAGAGGGACCTTT |
| 11977 | AGCTATCAGAGGGACCTTTT |
| 11978 | GCTATCAGAGGGACCTTTTC |
| 11979 | CTATCAGAGGGACCTTTTCT |
| 11980 | TATCAGAGGGACCTTTTCTC |
| 11981 | ATCAGAGGGACCTTTTCTCC |
| 11982 | TCAGAGGGACCTTTTCTCCC |
| 11983 | CAGAGGGACCTTTTCTCCCT |
| 11984 | AGAGGGACCTTTTCTCCCTT |
| 11985 | GAGGGACCTTTTCTCCCTTG |
| 11986 | AGGGACCTTTTCTCCCTTGA |
| 11987 | GGGACCTTTTCTCCCTTGAT |
| 11988 | GGACCTTTTCTCCCTTGATC |
| 11989 | GACCTTTTCTCCCTTGATCC |
| 11990 | ACCTTTTCTCCCTTGATCCT |
| 11991 | CCTTTTCTCCCTTGATCCTA |
| 11992 | CTTTTCTCCCTTGATCCTAG |
| 11993 | TTTTCTCCCTTGATCCTAGG |
| 11994 | TTTCTCCCTTGATCCTAGGG |
| 11995 | TTCTCCCTTGATCCTAGGGT |
| 11996 | TCTCCCTTGATCCTAGGGTT |
| 11997 | CTCCCTTGATCCTAGGGTTA |
| 11998 | TCCCTTGATCCTAGGGTTAC |
| 11999 | CCCTTGATCCTAGGGTTACC |
| 12000 | CCTTGATCCTAGGGTTACCT |
| 12001 | CTTGATCCTAGGGTTACCTG |
| 12002 | TTGATCCTAGGGTTACCTGG |
| 12003 | TGATCCTAGGGTTACCTGGC |
| 12004 | GATCCTAGGGTTACCTGGCT |
| 12005 | ATCCTAGGGTTACCTGGCTT |
| 12006 | TCCTAGGGTTACCTGGCTTT |
| 12007 | CCTAGGGTTACCTGGCTTTG |
| 12008 | CTAGGGTTACCTGGCTTTGC |
| 12009 | TAGGGTTACCTGGCTTTGCA |
| 12010 | AGGGTTACCTGGCTTTGCAG |
| 12011 | GGGTTACCTGGCTTTGCAGA |
| 12012 | GGTTACCTGGCTTTGCAGAT |
| 12013 | GTTACCTGGCTTTGCAGATG |
| 12014 | TTACCTGGCTTTGCAGATGC |
| 12015 | TACCTGGCTTTGCAGATGCT |
| 12016 | ACCTGGCTTTGCAGATGCTG |
| 12017 | CCTGGCTTTGCAGATGCTGA |
| 12018 | CTGGCTTTGCAGATGCTGAA |
| 12019 | TGGCTTTGCAGATGCTGAAT |
| 12020 | GGCTTTGCAGATGCTGAATT |
| 12021 | GCTTTGCAGATGCTGAATTC |
| 12022 | CTTTGCAGATGCTGAATTCG |
| 12023 | TTTGCAGATGCTGAATTCGC |
| 12024 | TTGCAGATGCTGAATTCGCA |
| 12025 | TGCAGATGCTGAATTCGCAG |
| 12026 | GCAGATGCTGAATTCGCAGG |
| 12027 | CAGATGCTGAATTCGCAGGT |
| 12028 | AGATGCTGAATTCGCAGGTG |
| 12029 | GATGCTGAATTCGCAGGTGC |
| 12030 | ATGCTGAATTCGCAGGTGCT |
| 12031 | TGCTGAATTCGCAGGTGCTG |
| 12032 | GCTGAATTCGCAGGTGCTGC |
| 12033 | CTGAATTCGCAGGTGCTGCT |
| 12034 | TGAATTCGCAGGTGCTGCTT |
| 12035 | GAATTCGCAGGTGCTGCTTC |
| 12036 | AATTCGCAGGTGCTGCTTCT |
| 12037 | ATTCGCAGGTGCTGCTTCTC |
| 12038 | TTCGCAGGTGCTGCTTCTCC |
| 12039 | TCGCAGGTGCTGCTTCTCCA |
| 12040 | CGCAGGTGCTGCTTCTCCAG |
| 12041 | GCAGGTGCTGCTTCTCCAGG |
| 12042 | CAGGTGCTGCTTCTCCAGGT |
| 12043 | AGGTGCTGCTTCTCCAGGTG |
| 12044 | GGTGCTGCTTCTCCAGGTGC |
| 12045 | GTGCTGCTTCTCCAGGTGCC |
| 12046 | TGCTGCTTCTCCAGGTGCCG |
| 12047 | GCTGCTTCTCCAGGTGCCGC |
| 12048 | CTGCTTCTCCAGGTGCCGCT |
| 12049 | TGCTTCTCCAGGTGCCGCTG |
| 12050 | GCTTCTCCAGGTGCCGCTGC |
| 12051 | CTTCTCCAGGTGCCGCTGCT |
| 12052 | TTCTCCAGGTGCCGCTGCTG |
| 12053 | TCTCCAGGTGCCGCTGCTGC |
| 12054 | CTCCAGGTGCCGCTGCTGCT |
| 12055 | TCCAGGTGCCGCTGCTGCTG |
| 12056 | CCAGGTGCCGCTGCTGCTGG |
| 12057 | CAGGTGCCGCTGCTGCTGGG |
| 12058 | AGGTGCCGCTGCTGCTGGGC |
| 12059 | GGTGCCGCTGCTGCTGGGCC |
| 12060 | GTGCCGCTGCTGCTGGGCCA |
| 12061 | TGCCGCTGCTGCTGGGCCAC |
| 12062 | GCCGCTGCTGCTGGGCCACC |
| 12063 | CCGCTGCTGCTGGGCCACCT |
| 12064 | CGCTGCTGCTGGGCCACCTT |
| 12065 | GCTGCTGCTGGGCCACCTTG |
| 12066 | CTGCTGCTGGGCCACCTTGT |
| 12067 | TGCTGCTGGGCCACCTTGTG |
| 12068 | GCTGCTGGGCCACCTTGTGG |
| 12069 | CTGCTGGGCCACCTTGTGGA |
| 12070 | TGCTGGGCCACCTTGTGGAA |
| 12071 | GCTGGGCCACCTTGTGGAAG |
| 12072 | CTGGGCCACCTTGTGGAAGA |
| 12073 | TGGGCCACCTTGTGGAAGAG |
| 12074 | GGGCCACCTTGTGGAAGAGT |
| 12075 | GGCCACCTTGTGGAAGAGTT |
| 12076 | GCCACCTTGTGGAAGAGTTG |
| 12077 | CCACCTTGTGGAAGAGTTGC |
| 12078 | CACCTTGTGGAAGAGTTGCT |
| 12079 | ACCTTGTGGAAGAGTTGCTG |
| 12080 | CCTTGTGGAAGAGTTGCTGG |
| 12081 | CTTGTGGAAGAGTTGCTGGA |
| 12082 | TTGTGGAAGAGTTGCTGGAT |
| 12083 | TGTGGAAGAGTTGCTGGATC |
| 12084 | GTGGAAGAGTTGCTGGATCC |
| 12085 | TGGAAGAGTTGCTGGATCCT |
| 12086 | GGAAGAGTTGCTGGATCCTG |
| 12087 | GAAGAGTTGCTGGATCCTGC |
| 12088 | AAGAGTTGCTGGATCCTGCT |
| 12089 | AGAGTTGCTGGATCCTGCTG |
| 12090 | GAGTTGCTGGATCCTGCTGT |
| 12091 | AGTTGCTGGATCCTGCTGTT |
| 12092 | GTTGCTGGATCCTGCTGTTC |
| 12093 | TTGCTGGATCCTGCTGTTCT |
| 12094 | TGCTGGATCCTGCTGTTCTG |
| 12095 | GCTGGATCCTGCTGTTCTGA |
| 12096 | CTGGATCCTGCTGTTCTGAG |
| 12097 | TGGATCCTGCTGTTCTGAGC |
| 12098 | GGATCCTGCTGTTCTGAGCC |
| 12099 | GATCCTGCTGTTCTGAGCCT |
| 12100 | ATCCTGCTGTTCTGAGCCTT |
| 12101 | TCCTGCTGTTCTGAGCCTTG |
| 12102 | CCTGCTGTTCTGAGCCTTGA |
| 12103 | CTGCTGTTCTGAGCCTTGAG |
| 12104 | TGCTGTTCTGAGCCTTGAGT |
| 12105 | GCTGTTCTGAGCCTTGAGTT |
| 12106 | CTGTTCTGAGCCTTGAGTTG |
| 12107 | TGTTCTGAGCCTTGAGTTGT |
| 12108 | GTTCTGAGCCTTGAGTTGTG |
| 12109 | TTCTGAGCCTTGAGTTGTGT |
| 12110 | TCTGAGCCTTGAGTTGTGTC |
| 12111 | CTGAGCCTTGAGTTGTGTCT |
| 12112 | TGAGCCTTGAGTTGTGTCTG |
| 12113 | GAGCCTTGAGTTGTGTCTGG |
| 12114 | AGCCTTGAGTTGTGTCTGGG |
| 12115 | GCCTTGAGTTGTGTCTGGGG |
| 12116 | CCTTGAGTTGTGTCTGGGGA |
| 12117 | CTTGAGTTGTGTCTGGGGAG |
| 12118 | TTGAGTTGTGTCTGGGGAGG |
| 12119 | TGAGTTGTGTCTGGGGAGGG |
| 12120 | GAGTTGTGTCTGGGGAGGGG |
| 12121 | AGTTGTGTCTGGGGAGGGGT |
| 12122 | GTTGTGTCTGGGGAGGGGTG |
| 12123 | TTGTGTCTGGGGAGGGGTGA |
| 12124 | TGTGTCTGGGGAGGGGTGAA |
| 12125 | GTGTCTGGGGAGGGGTGAAA |
| 12126 | TGTCTGGGGAGGGGTGAAAA |
| 12127 | GTCTGGGGAGGGGTGAAAAC |
| 12128 | TCTGGGGAGGGGTGAAAACC |
| 12129 | CTGGGGAGGGGTGAAAACCT |
| 12130 | TGGGGAGGGGTGAAAACCTT |
| 12131 | GGGGAGGGGTGAAAACCTTG |
| 12132 | GGGAGGGGTGAAAACCTTGG |
| 12133 | GGAGGGGTGAAAACCTTGGT |
| 12134 | GAGGGGTGAAAACCTTGGTG |
| 12135 | AGGGGTGAAAACCTTGGTGA |
| 12136 | GGGGTGAAAACCTTGGTGAG |
| 12137 | GGGTGAAAACCTTGGTGAGG |
| 12138 | GGTGAAAACCTTGGTGAGGA |
| 12139 | GTGAAAACCTTGGTGAGGAC |
| 12140 | TGAAAACCTTGGTGAGGACC |
| 12141 | GAAAACCTTGGTGAGGACCC |
| 12142 | AAAACCTTGGTGAGGACCCA |
| 12143 | AAACCTTGGTGAGGACCCAG |
| 12144 | AACCTTGGTGAGGACCCAGC |
| 12145 | ACCTTGGTGAGGACCCAGCT |
| 12146 | CCTTGGTGAGGACCCAGCTT |
| 12147 | CTTGGTGAGGACCCAGCTTG |
| 12148 | TTGGTGAGGACCCAGCTTGC |
| 12149 | TGGTGAGGACCCAGCTTGCC |
| 12150 | GGTGAGGACCCAGCTTGCCT |
| 12151 | GTGAGGACCCAGCTTGCCTA |
| 12152 | TGAGGACCCAGCTTGCCTAC |
| 12153 | GAGGACCCAGCTTGCCTACC |
| 12154 | AGGACCCAGCTTGCCTACCC |
| 12155 | GGACCCAGCTTGCCTACCCC |
| 12156 | GACCCAGCTTGCCTACCCCA |
| 12157 | ACCCAGCTTGCCTACCCCAA |
| 12158 | CCCAGCTTGCCTACCCCAAC |
| 12159 | CCAGCTTGCCTACCCCAACC |
| 12160 | CAGCTTGCCTACCCCAACCT |
| 12161 | AGCTTGCCTACCCCAACCTC |
| 12162 | GCTTGCCTACCCCAACCTCT |
| 12163 | CTTGCCTACCCCAACCTCTT |
| 12164 | TTGCCTACCCCAACCTCTTA |
| 12165 | TGCCTACCCCAACCTCTTAA |
| 12166 | GCCTACCCCAACCTCTTAAT |
| 12167 | CCTACCCCAACCTCTTAATT |
| 12168 | CTACCCCAACCTCTTAATTC |
| 12169 | TACCCCAACCTCTTAATTCA |
| 12170 | ACCCCAACCTCTTAATTCAT |
| 12171 | CCCCAACCTCTTAATTCATC |
| 12172 | CCCAACCTCTTAATTCATCC |
| 12173 | CCAACCTCTTAATTCATCCA |
| 12174 | CAACCTCTTAATTCATCCAC |
| 12175 | AACCTCTTAATTCATCCACT |
| 12176 | ACCTCTTAATTCATCCACTC |
| 12177 | CCTCTTAATTCATCCACTCA |
| 12178 | CTCTTAATTCATCCACTCAT |
| 12179 | TCTTAATTCATCCACTCATC |
| 12180 | CTTAATTCATCCACTCATCC |
| 12181 | TTAATTCATCCACTCATCCA |
| 12182 | TAATTCATCCACTCATCCAT |
| 12183 | AATTCATCCACTCATCCATC |
| 12184 | ATTCATCCACTCATCCATCC |
| 12185 | TTCATCCACTCATCCATCCT |
| 12186 | TCATCCACTCATCCATCCTT |
| 12187 | CATCCACTCATCCATCCTTC |
| 12188 | ATCCACTCATCCATCCTTCC |
| 12189 | TCCACTCATCCATCCTTCCA |
| 12190 | CCACTCATCCATCCTTCCAA |
| 12191 | CACTCATCCATCCTTCCAAA |
| 12192 | ACTCATCCATCCTTCCAAAT |
| 12193 | CTCATCCATCCTTCCAAATC |
| 12194 | TCATCCATCCTTCCAAATCT |
| 12195 | CATCCATCCTTCCAAATCTC |
| 12196 | ATCCATCCTTCCAAATCTCC |
| 12197 | TCCATCCTTCCAAATCTCCA |
| 12198 | CCATCCTTCCAAATCTCCAT |
| 12199 | CATCCTTCCAAATCTCCATC |
| 12200 | ATCCTTCCAAATCTCCATCC |
| 12201 | TCCTTCCAAATCTCCATCCG |
| 12202 | CCTTCCAAATCTCCATCCGC |
| 12203 | CTTCCAAATCTCCATCCGCT |
| 12204 | TTCCAAATCTCCATCCGCTG |
| 12205 | TCCAAATCTCCATCCGCTGA |
| 12206 | CCAAATCTCCATCCGCTGAG |
| 12207 | CAAATCTCCATCCGCTGAGG |
| 12208 | AAATCTCCATCCGCTGAGGC |
| 12209 | AATCTCCATCCGCTGAGGCC |
| 12210 | ATCTCCATCCGCTGAGGCCA |
| 12211 | TCTCCATCCGCTGAGGCCAG |
| 12212 | CTCCATCCGCTGAGGCCAGG |
| 12213 | TCCATCCGCTGAGGCCAGGC |
| 12214 | CCATCCGCTGAGGCCAGGCA |
| 12215 | CATCCGCTGAGGCCAGGCAA |
| 12216 | ATCCGCTGAGGCCAGGCAAG |
| 12217 | TCCGCTGAGGCCAGGCAAGG |
| 12218 | CCGCTGAGGCCAGGCAAGGG |
| 12219 | CGCTGAGGCCAGGCAAGGGA |
| 12220 | GCTGAGGCCAGGCAAGGGAG |
| 12221 | CTGAGGCCAGGCAAGGGAGT |
| 12222 | TGAGGCCAGGCAAGGGAGTC |
| 12223 | GAGGCCAGGCAAGGGAGTCT |
| 12224 | AGGCCAGGCAAGGGAGTCTT |
| 12225 | GGCCAGGCAAGGGAGTCTTT |
| 12226 | GCCAGGCAAGGGAGTCTTTC |
| 12227 | CCAGGCAAGGGAGTCTTTCT |
| 12228 | CAGGCAAGGGAGTCTTTCTT |
| 12229 | AGGCAAGGGAGTCTTTCTTT |
| 12230 | GGCAAGGGAGTCTTTCTTTT |
| 12231 | GCAAGGGAGTCTTTCTTTTT |
| 12232 | CAAGGGAGTCTTTCTTTTTT |
| 12233 | AAGGGAGTCTTTCTTTTTTC |
| 12234 | AGGGAGTCTTTCTTTTTTCT |
| 12235 | GGGAGTCTTTCTTTTTTCTT |
| 12236 | GGAGTCTTTCTTTTTTCTTT |
| 12237 | GAGTCTTTCTTTTTTCTTTT |
| 12238 | AGTCTTTCTTTTTTCTTTTT |
| 12239 | GTCTTTCTTTTTTCTTTTTT |
| 12240 | TCTTTCTTTTTTCTTTTTTT |
| 12241 | CTTTCTTTTTTCTTTTTTTT |
| 12242 | TTTCTTTTTTCTTTTTTTTC |
| 12243 | TTCTTTTTTCTTTTTTTTCC |
| 12244 | TCTTTTTTCTTTTTTTTCCC |
| 12245 | CTTTTTTCTTTTTTTTCCCA |
| 12246 | TTTTTTCTTTTTTTTCCCAA |
| 12247 | TTTTTCTTTTTTTTCCCAAT |
| 12248 | TTTTCTTTTTTTTCCCAATG |
| 12249 | TTTCTTTTTTTTCCCAATGA |
| 12250 | TTCTTTTTTTTCCCAATGAC |
| 12251 | TCTTTTTTTTCCCAATGACG |
| 12252 | CTTTTTTTTCCCAATGACGG |
| 12253 | TTTTTTTTCCCAATGACGGG |
| 12254 | TTTTTTTCCCAATGACGGGG |
| 12255 | TTTTTTCCCAATGACGGGGT |
| 12256 | TTTTTCCCAATGACGGGGTC |
| 12257 | TTTTCCCAATGACGGGGTCT |
| 12258 | TTTCCCAATGACGGGGTCTC |
| 12259 | TTCCCAATGACGGGGTCTCG |
| 12260 | TCCCAATGACGGGGTCTCGT |
| 12261 | CCCAATGACGGGGTCTCGTT |
| 12262 | CCAATGACGGGGTCTCGTTC |
| 12263 | CAATGACGGGGTCTCGTTCT |
| 12264 | AATGACGGGGTCTCGTTCTC |
| 12265 | ATGACGGGGTCTCGTTCTCT |
| 12266 | TGACGGGGTCTCGTTCTCTC |
| 12267 | GACGGGGTCTCGTTCTCTCG |
| 12268 | ACGGGGTCTCGTTCTCTCGC |
| 12269 | CGGGGTCTCGTTCTCTCGCC |
| 12270 | GGGGTCTCGTTCTCTCGCCC |
| 12271 | GGGTCTCGTTCTCTCGCCCA |
| 12272 | GGTCTCGTTCTCTCGCCCAG |
| 12273 | GTCTCGTTCTCTCGCCCAGG |
| 12274 | TCTCGTTCTCTCGCCCAGGC |
| 12275 | CTCGTTCTCTCGCCCAGGCT |
| 12276 | TCGTTCTCTCGCCCAGGCTG |
| 12277 | CGTTCTCTCGCCCAGGCTGG |
| 12278 | GTTCTCTCGCCCAGGCTGGA |
| 12279 | TTCTCTCGCCCAGGCTGGAG |
| 12280 | TCTCTCGCCCAGGCTGGAGT |
| 12281 | CTCTCGCCCAGGCTGGAGTG |
| 12282 | TCTCGCCCAGGCTGGAGTGC |
| 12283 | CTCGCCCAGGCTGGAGTGCA |
| 12284 | TCGCCCAGGCTGGAGTGCAG |
| 12285 | CGCCCAGGCTGGAGTGCAGT |
| 12286 | GCCCAGGCTGGAGTGCAGTG |
| 12287 | CCCAGGCTGGAGTGCAGTGG |
| 12288 | CCAGGCTGGAGTGCAGTGGT |
| 12289 | CAGGCTGGAGTGCAGTGGTG |
| 12290 | AGGCTGGAGTGCAGTGGTGC |
| 12291 | GGCTGGAGTGCAGTGGTGCT |
| 12292 | GCTGGAGTGCAGTGGTGCTG |
| 12293 | CTGGAGTGCAGTGGTGCTGT |
| 12294 | TGGAGTGCAGTGGTGCTGTC |
| 12295 | GGAGTGCAGTGGTGCTGTCA |
| 12296 | GAGTGCAGTGGTGCTGTCAC |
| 12297 | AGTGCAGTGGTGCTGTCACA |
| 12298 | GTGCAGTGGTGCTGTCACAG |
| 12299 | TGCAGTGGTGCTGTCACAGC |
| 12300 | GCAGTGGTGCTGTCACAGCT |
| 12301 | CAGTGGTGCTGTCACAGCTC |
| 12302 | AGTGGTGCTGTCACAGCTCA |
| 12303 | GTGGTGCTGTCACAGCTCAC |
| 12304 | TGGTGCTGTCACAGCTCACT |
| 12305 | GGTGCTGTCACAGCTCACTG |
| 12306 | GTGCTGTCACAGCTCACTGC |
| 12307 | TGCTGTCACAGCTCACTGCA |
| 12308 | GCTGTCACAGCTCACTGCAG |
| 12309 | CTGTCACAGCTCACTGCAGC |
| 12310 | TGTCACAGCTCACTGCAGCC |
| 12311 | GTCACAGCTCACTGCAGCCT |
| 12312 | TCACAGCTCACTGCAGCCTC |
| 12313 | CACAGCTCACTGCAGCCTCC |
| 12314 | ACAGCTCACTGCAGCCTCCA |
| 12315 | CAGCTCACTGCAGCCTCCAA |
| 12316 | AGCTCACTGCAGCCTCCAAC |
| 12317 | GCTCACTGCAGCCTCCAACT |
| 12318 | CTCACTGCAGCCTCCAACTC |
| 12319 | TCACTGCAGCCTCCAACTCC |
| 12320 | CACTGCAGCCTCCAACTCCT |
| 12321 | ACTGCAGCCTCCAACTCCTG |
| 12322 | CTGCAGCCTCCAACTCCTGG |
| 12323 | TGCAGCCTCCAACTCCTGGG |
| 12324 | GCAGCCTCCAACTCCTGGGG |
| 12325 | CAGCCTCCAACTCCTGGGGT |
| 12326 | AGCCTCCAACTCCTGGGGTC |
| 12327 | GCCTCCAACTCCTGGGGTCA |
| 12328 | CCTCCAACTCCTGGGGTCAG |
| 12329 | CTCCAACTCCTGGGGTCAGG |
| 12330 | TCCAACTCCTGGGGTCAGGC |
| 12331 | CCAACTCCTGGGGTCAGGCG |
| 12332 | CAACTCCTGGGGTCAGGCGA |
| 12333 | AACTCCTGGGGTCAGGCGAT |
| 12334 | ACTCCTGGGGTCAGGCGATC |
| 12335 | CTCCTGGGGTCAGGCGATCC |
| 12336 | TCCTGGGGTCAGGCGATCCT |
| 12337 | CCTGGGGTCAGGCGATCCTC |
| 12338 | CTGGGGTCAGGCGATCCTCC |
| 12339 | TGGGGTCAGGCGATCCTCCT |
| 12340 | GGGGTCAGGCGATCCTCCTG |
| 12341 | GGGTCAGGCGATCCTCCTGT |
| 12342 | GGTCAGGCGATCCTCCTGTT |
| 12343 | GTCAGGCGATCCTCCTGTTT |
| 12344 | TCAGGCGATCCTCCTGTTTT |
| 12345 | CAGGCGATCCTCCTGTTTTC |
| 12346 | AGGCGATCCTCCTGTTTTCA |
| 12347 | GGCGATCCTCCTGTTTTCAG |
| 12348 | GCGATCCTCCTGTTTTCAGC |
| 12349 | CGATCCTCCTGTTTTCAGCC |
| 12350 | GATCCTCCTGTTTTCAGCCT |
| 12351 | ATCCTCCTGTTTTCAGCCTC |
| 12352 | TCCTCCTGTTTTCAGCCTCC |
| 12353 | CCTCCTGTTTTCAGCCTCCT |
| 12354 | CTCCTGTTTTCAGCCTCCTG |
| 12355 | TCCTGTTTTCAGCCTCCTGT |
| 12356 | CCTGTTTTCAGCCTCCTGTG |
| 12357 | CTGTTTTCAGCCTCCTGTGT |
| 12358 | TGTTTTCAGCCTCCTGTGTA |
| 12359 | GTTTTCAGCCTCCTGTGTAG |
| 12360 | TTTTCAGCCTCCTGTGTAGC |
| 12361 | TTTCAGCCTCCTGTGTAGCT |
| 12362 | TTCAGCCTCCTGTGTAGCTG |
| 12363 | TCAGCCTCCTGTGTAGCTGG |
| 12364 | CAGCCTCCTGTGTAGCTGGG |
| 12365 | AGCCTCCTGTGTAGCTGGGA |
| 12366 | GCCTCCTGTGTAGCTGGGAC |
| 12367 | CCTCCTGTGTAGCTGGGACT |
| 12368 | CTCCTGTGTAGCTGGGACTA |
| 12369 | TCCTGTGTAGCTGGGACTAC |
| 12370 | CCTGTGTAGCTGGGACTACA |
| 12371 | CTGTGTAGCTGGGACTACAG |
| 12372 | TGTGTAGCTGGGACTACAGT |
| 12373 | GTGTAGCTGGGACTACAGTC |
| 12374 | TGTAGCTGGGACTACAGTCA |
| 12375 | GTAGCTGGGACTACAGTCAT |
| 12376 | TAGCTGGGACTACAGTCATG |
| 12377 | AGCTGGGACTACAGTCATGC |
| 12378 | GCTGGGACTACAGTCATGCA |
| 12379 | CTGGGACTACAGTCATGCAG |
| 12380 | TGGGACTACAGTCATGCAGC |
| 12381 | GGGACTACAGTCATGCAGCT |
| 12382 | GGACTACAGTCATGCAGCTC |
| 12383 | GACTACAGTCATGCAGCTCT |
| 12384 | ACTACAGTCATGCAGCTCTA |
| 12385 | CTACAGTCATGCAGCTCTAT |
| 12386 | TACAGTCATGCAGCTCTATG |
| 12387 | ACAGTCATGCAGCTCTATGC |
| 12388 | CAGTCATGCAGCTCTATGCC |
| 12389 | AGTCATGCAGCTCTATGCCT |
| 12390 | GTCATGCAGCTCTATGCCTG |
| 12391 | TCATGCAGCTCTATGCCTGG |
| 12392 | CATGCAGCTCTATGCCTGGC |
| 12393 | ATGCAGCTCTATGCCTGGCT |
| 12394 | TGCAGCTCTATGCCTGGCTT |
| 12395 | GCAGCTCTATGCCTGGCTTA |
| 12396 | CAGCTCTATGCCTGGCTTAT |
| 12397 | AGCTCTATGCCTGGCTTATT |
| 12398 | GCTCTATGCCTGGCTTATTT |
| 12399 | CTCTATGCCTGGCTTATTTT |
| 12400 | TCTATGCCTGGCTTATTTTT |
| 12401 | CTATGCCTGGCTTATTTTTT |
| 12402 | TATGCCTGGCTTATTTTTTA |
| 12403 | ATGCCTGGCTTATTTTTTAT |
| 12404 | TGCCTGGCTTATTTTTTATT |
| 12405 | GCCTGGCTTATTTTTTATTT |
| 12406 | CCTGGCTTATTTTTTATTTT |
| 12407 | CTGGCTTATTTTTTATTTTT |
| 12408 | TGGCTTATTTTTTATTTTTT |
| 12409 | GGCTTATTTTTTATTTTTTC |
| 12410 | GCTTATTTTTTATTTTTTCA |
| 12411 | CTTATTTTTTATTTTTTCAG |
| 12412 | TTATTTTTTATTTTTTCAGA |
| 12413 | TATTTTTTATTTTTTCAGAC |
| 12414 | ATTTTTTATTTTTTCAGACA |
| 12415 | TTTTTTATTTTTTCAGACAG |
| 12416 | TTTTTATTTTTTCAGACAGA |
| 12417 | TTTTATTTTTTCAGACAGAG |
| 12418 | TTTATTTTTTCAGACAGAGT |
| 12419 | TTATTTTTTCAGACAGAGTC |
| 12420 | TATTTTTTCAGACAGAGTCT |
| 12421 | ATTTTTTCAGACAGAGTCTC |
| 12422 | TTTTTTCAGACAGAGTCTCG |
| 12423 | TTTTTCAGACAGAGTCTCGC |
| 12424 | TTTTCAGACAGAGTCTCGCT |
| 12425 | TTTCAGACAGAGTCTCGCTC |
| 12426 | TTCAGACAGAGTCTCGCTCT |
| 12427 | TCAGACAGAGTCTCGCTCTG |
| 12428 | CAGACAGAGTCTCGCTCTGT |
| 12429 | AGACAGAGTCTCGCTCTGTC |
| 12430 | GACAGAGTCTCGCTCTGTCA |
| 12431 | ACAGAGTCTCGCTCTGTCAC |
| 12432 | CAGAGTCTCGCTCTGTCACC |
| 12433 | AGAGTCTCGCTCTGTCACCC |
| 12434 | GAGTCTCGCTCTGTCACCCA |
| 12435 | AGTCTCGCTCTGTCACCCAG |
| 12436 | GTCTCGCTCTGTCACCCAGG |
| 12437 | TCTCGCTCTGTCACCCAGGT |
| 12438 | CTCGCTCTGTCACCCAGGTT |
| 12439 | TCGCTCTGTCACCCAGGTTG |
| 12440 | CGCTCTGTCACCCAGGTTGG |
| 12441 | GCTCTGTCACCCAGGTTGGA |
| 12442 | CTCTGTCACCCAGGTTGGAG |
| 12443 | TCTGTCACCCAGGTTGGAGT |
| 12444 | CTGTCACCCAGGTTGGAGTG |
| 12445 | TGTCACCCAGGTTGGAGTGC |
| 12446 | GTCACCCAGGTTGGAGTGCA |
| 12447 | TCACCCAGGTTGGAGTGCAG |
| 12448 | CACCCAGGTTGGAGTGCAGT |
| 12449 | ACCCAGGTTGGAGTGCAGTG |
| 12450 | CCCAGGTTGGAGTGCAGTGG |
| 12451 | CCAGGTTGGAGTGCAGTGGC |
| 12452 | CAGGTTGGAGTGCAGTGGCG |
| 12453 | AGGTTGGAGTGCAGTGGCGC |
| 12454 | GGTTGGAGTGCAGTGGCGCA |
| 12455 | GTTGGAGTGCAGTGGCGCAA |
| 12456 | TTGGAGTGCAGTGGCGCAAT |
| 12457 | TGGAGTGCAGTGGCGCAATC |
| 12458 | GGAGTGCAGTGGCGCAATCT |
| 12459 | GAGTGCAGTGGCGCAATCTT |
| 12460 | AGTGCAGTGGCGCAATCTTG |
| 12461 | GTGCAGTGGCGCAATCTTGG |
| 12462 | TGCAGTGGCGCAATCTTGGC |
| 12463 | GCAGTGGCGCAATCTTGGCT |
| 12464 | CAGTGGCGCAATCTTGGCTC |
| 12465 | AGTGGCGCAATCTTGGCTCA |
| 12466 | GTGGCGCAATCTTGGCTCAC |
| 12467 | TGGCGCAATCTTGGCTCACT |
| 12468 | GGCGCAATCTTGGCTCACTG |
| 12469 | GCGCAATCTTGGCTCACTGC |
| 12470 | CGCAATCTTGGCTCACTGCA |
| 12471 | GCAATCTTGGCTCACTGCAA |
| 12472 | CAATCTTGGCTCACTGCAAC |
| 12473 | AATCTTGGCTCACTGCAACC |
| 12474 | ATCTTGGCTCACTGCAACCT |
| 12475 | TCTTGGCTCACTGCAACCTC |
| 12476 | CTTGGCTCACTGCAACCTCT |
| 12477 | TTGGCTCACTGCAACCTCTG |
| 12478 | TGGCTCACTGCAACCTCTGC |
| 12479 | GGCTCACTGCAACCTCTGCC |
| 12480 | GCTCACTGCAACCTCTGCCT |
| 12481 | CTCACTGCAACCTCTGCCTC |
| 12482 | TCACTGCAACCTCTGCCTCC |
| 12483 | CACTGCAACCTCTGCCTCCC |
| 12484 | ACTGCAACCTCTGCCTCCCA |
| 12485 | CTGCAACCTCTGCCTCCCAG |
| 12486 | TGCAACCTCTGCCTCCCAGA |
| 12487 | GCAACCTCTGCCTCCCAGAC |
| 12488 | CAACCTCTGCCTCCCAGACT |
| 12489 | AACCTCTGCCTCCCAGACTC |
| 12490 | ACCTCTGCCTCCCAGACTCA |
| 12491 | CCTCTGCCTCCCAGACTCAA |
| 12492 | CTCTGCCTCCCAGACTCAAG |
| 12493 | TCTGCCTCCCAGACTCAAGT |
| 12494 | CTGCCTCCCAGACTCAAGTG |
| 12495 | TGCCTCCCAGACTCAAGTGA |
| 12496 | GCCTCCCAGACTCAAGTGAT |
| 12497 | CCTCCCAGACTCAAGTGATT |
| 12498 | CTCCCAGACTCAAGTGATTC |
| 12499 | TCCCAGACTCAAGTGATTCT |
| 12500 | CCCAGACTCAAGTGATTCTT |
| 12501 | CCAGACTCAAGTGATTCTTG |
| 12502 | CAGACTCAAGTGATTCTTGT |
| 12503 | AGACTCAAGTGATTCTTGTG |
| 12504 | GACTCAAGTGATTCTTGTGT |
| 12505 | ACTCAAGTGATTCTTGTGTC |
| 12506 | CTCAAGTGATTCTTGTGTCT |
| 12507 | TCAAGTGATTCTTGTGTCTC |
| 12508 | CAAGTGATTCTTGTGTCTCA |
| 12509 | AAGTGATTCTTGTGTCTCAG |
| 12510 | AGTGATTCTTGTGTCTCAGC |
| 12511 | GTGATTCTTGTGTCTCAGCC |
| 12512 | TGATTCTTGTGTCTCAGCCT |
| 12513 | GATTCTTGTGTCTCAGCCTC |
| 12514 | ATTCTTGTGTCTCAGCCTCC |
| 12515 | TTCTTGTGTCTCAGCCTCCC |
| 12516 | TCTTGTGTCTCAGCCTCCCA |
| 12517 | CTTGTGTCTCAGCCTCCCAA |
| 12518 | TTGTGTCTCAGCCTCCCAAG |
| 12519 | TGTGTCTCAGCCTCCCAAGT |
| 12520 | GTGTCTCAGCCTCCCAAGTA |
| 12521 | TGTCTCAGCCTCCCAAGTAG |
| 12522 | GTCTCAGCCTCCCAAGTAGC |
| 12523 | TCTCAGCCTCCCAAGTAGCT |
| 12524 | CTCAGCCTCCCAAGTAGCTG |
| 12525 | TCAGCCTCCCAAGTAGCTGC |
| 12526 | CAGCCTCCCAAGTAGCTGCC |
| 12527 | AGCCTCCCAAGTAGCTGCCA |
| 12528 | GCCTCCCAAGTAGCTGCCAC |
| 12529 | CCTCCCAAGTAGCTGCCACC |
| 12530 | CTCCCAAGTAGCTGCCACCA |
| 12531 | TCCCAAGTAGCTGCCACCAC |
| 12532 | CCCAAGTAGCTGCCACCACA |
| 12533 | CCAAGTAGCTGCCACCACAC |
| 12534 | CAAGTAGCTGCCACCACACC |
| 12535 | AAGTAGCTGCCACCACACCT |
| 12536 | AGTAGCTGCCACCACACCTG |
| 12537 | GTAGCTGCCACCACACCTGG |
| 12538 | TAGCTGCCACCACACCTGGC |
| 12539 | AGCTGCCACCACACCTGGCT |
| 12540 | GCTGCCACCACACCTGGCTA |
| 12541 | CTGCCACCACACCTGGCTAA |
| 12542 | TGCCACCACACCTGGCTAAT |
| 12543 | GCCACCACACCTGGCTAATT |
| 12544 | CCACCACACCTGGCTAATTT |
| 12545 | CACCACACCTGGCTAATTTT |
| 12546 | ACCACACCTGGCTAATTTTT |
| 12547 | CCACACCTGGCTAATTTTTG |
| 12548 | CACACCTGGCTAATTTTTGT |
| 12549 | ACACCTGGCTAATTTTTGTA |
| 12550 | CACCTGGCTAATTTTTGTAT |
| 12551 | ACCTGGCTAATTTTTGTATT |
| 12552 | CCTGGCTAATTTTTGTATTT |
| 12553 | CTGGCTAATTTTTGTATTTG |
| 12554 | TGGCTAATTTTTGTATTTGT |
| 12555 | GGCTAATTTTTGTATTTGTA |
| 12556 | GCTAATTTTTGTATTTGTAT |
| 12557 | CTAATTTTTGTATTTGTATT |
| 12558 | TAATTTTTGTATTTGTATTT |
| 12559 | AATTTTTGTATTTGTATTTT |
| 12560 | ATTTTTGTATTTGTATTTTA |
| 12561 | TTTTTGTATTTGTATTTTAT |
| 12562 | TTTTGTATTTGTATTTTATT |
| 12563 | TTTGTATTTGTATTTTATTT |
| 12564 | TTGTATTTGTATTTTATTTT |
| 12565 | TGTATTTGTATTTTATTTTA |
| 12566 | GTATTTGTATTTTATTTTAT |
| 12567 | TATTTGTATTTTATTTTATT |
| 12568 | ATTTGTATTTTATTTTATTT |
| 12569 | TTTGTATTTTATTTTATTTA |
| 12570 | TTGTATTTTATTTTATTTAT |
| 12571 | TGTATTTTATTTTATTTATT |
| 12572 | GTATTTTATTTTATTTATTA |
| 12573 | TATTTTATTTTATTTATTAT |
| 12574 | ATTTTATTTTATTTATTATT |
| 12575 | TTTTATTTTATTTATTATTA |
| 12576 | TTTATTTTATTTATTATTAT |
| 12577 | TTATTTTATTTATTATTATT |
| 12578 | TATTTTATTTATTATTATTA |
| 12579 | ATTTTATTTATTATTATTAT |
| 12580 | TTTTATTTATTATTATTATT |
| 12581 | TTTATTTATTATTATTATTA |
| 12582 | TTATTTATTATTATTATTAT |
| 12583 | TATTTATTATTATTATTATT |
| 12584 | ATTTATTATTATTATTATTT |
| 12585 | TTTATTATTATTATTATTTT |
| 12586 | TTATTATTATTATTATTTTG |
| 12587 | TATTATTATTATTATTTTGA |
| 12588 | ATTATTATTATTATTTTGAG |
| 12589 | TTATTATTATTATTTTGAGA |
| 12590 | TATTATTATTATTTTGAGAT |
| 12591 | ATTATTATTATTTTGAGATG |
| 12592 | TTATTATTATTTTGAGATGG |
| 12593 | TATTATTATTTTGAGATGGA |
| 12594 | ATTATTATTTTGAGATGGAG |
| 12595 | TTATTATTTTGAGATGGAGT |
| 12596 | TATTATTTTGAGATGGAGTC |
| 12597 | ATTATTTTGAGATGGAGTCG |
| 12598 | TTATTTTGAGATGGAGTCGA |
| 12599 | TATTTTGAGATGGAGTCGAG |
| 12600 | ATTTTGAGATGGAGTCGAGC |
| 12601 | TTTTGAGATGGAGTCGAGCT |
| 12602 | TTTGAGATGGAGTCGAGCTC |
| 12603 | TTGAGATGGAGTCGAGCTCT |
| 12604 | TGAGATGGAGTCGAGCTCTG |
| 12605 | GAGATGGAGTCGAGCTCTGT |
| 12606 | AGATGGAGTCGAGCTCTGTC |
| 12607 | GATGGAGTCGAGCTCTGTCG |
| 12608 | ATGGAGTCGAGCTCTGTCGC |
| 12609 | TGGAGTCGAGCTCTGTCGCC |
| 12610 | GGAGTCGAGCTCTGTCGCCC |
| 12611 | GAGTCGAGCTCTGTCGCCCA |
| 12612 | AGTCGAGCTCTGTCGCCCAG |
| 12613 | GTCGAGCTCTGTCGCCCAGG |
| 12614 | TCGAGCTCTGTCGCCCAGGC |
| 12615 | CGAGCTCTGTCGCCCAGGCT |
| 12616 | GAGCTCTGTCGCCCAGGCTG |
| 12617 | AGCTCTGTCGCCCAGGCTGG |
| 12618 | GCTCTGTCGCCCAGGCTGGA |
| 12619 | CTCTGTCGCCCAGGCTGGAG |
| 12620 | TCTGTCGCCCAGGCTGGAGT |
| 12621 | CTGTCGCCCAGGCTGGAGTG |
| 12622 | TGTCGCCCAGGCTGGAGTGC |
| 12623 | GTCGCCCAGGCTGGAGTGCA |
| 12624 | TCGCCCAGGCTGGAGTGCAA |
| 12625 | CGCCCAGGCTGGAGTGCAAT |
| 12626 | GCCCAGGCTGGAGTGCAATG |
| 12627 | CCCAGGCTGGAGTGCAATGG |
| 12628 | CCAGGCTGGAGTGCAATGGC |
| 12629 | CAGGCTGGAGTGCAATGGCA |
| 12630 | AGGCTGGAGTGCAATGGCAT |
| 12631 | GGCTGGAGTGCAATGGCATG |
| 12632 | GCTGGAGTGCAATGGCATGA |
| 12633 | CTGGAGTGCAATGGCATGAT |
| 12634 | TGGAGTGCAATGGCATGATC |
| 12635 | GGAGTGCAATGGCATGATCC |
| 12636 | GAGTGCAATGGCATGATCCC |
| 12637 | AGTGCAATGGCATGATCCCG |
| 12638 | GTGCAATGGCATGATCCCGG |
| 12639 | TGCAATGGCATGATCCCGGC |
| 12640 | GCAATGGCATGATCCCGGCT |
| 12641 | CAATGGCATGATCCCGGCTC |
| 12642 | AATGGCATGATCCCGGCTCA |
| 12643 | ATGGCATGATCCCGGCTCAC |
| 12644 | TGGCATGATCCCGGCTCACT |
| 12645 | GGCATGATCCCGGCTCACTG |
| 12646 | GCATGATCCCGGCTCACTGC |
| 12647 | CATGATCCCGGCTCACTGCA |
| 12648 | ATGATCCCGGCTCACTGCAA |
| 12649 | TGATCCCGGCTCACTGCAAC |
| 12650 | GATCCCGGCTCACTGCAACC |
| 12651 | ATCCCGGCTCACTGCAACCT |
| 12652 | TCCCGGCTCACTGCAACCTC |
| 12653 | CCCGGCTCACTGCAACCTCC |
| 12654 | CCGGCTCACTGCAACCTCCG |
| 12655 | CGGCTCACTGCAACCTCCGC |
| 12656 | GGCTCACTGCAACCTCCGCC |
| 12657 | GCTCACTGCAACCTCCGCCT |
| 12658 | CTCACTGCAACCTCCGCCTC |
| 12659 | TCACTGCAACCTCCGCCTCC |
| 12660 | CACTGCAACCTCCGCCTCCC |
| 12661 | ACTGCAACCTCCGCCTCCCG |
| 12662 | CTGCAACCTCCGCCTCCCGG |
| 12663 | TGCAACCTCCGCCTCCCGGG |
| 12664 | GCAACCTCCGCCTCCCGGGT |
| 12665 | CAACCTCCGCCTCCCGGGTT |
| 12666 | AACCTCCGCCTCCCGGGTTC |
| 12667 | ACCTCCGCCTCCCGGGTTCA |
| 12668 | CCTCCGCCTCCCGGGTTCAA |
| 12669 | CTCCGCCTCCCGGGTTCAAG |
| 12670 | TCCGCCTCCCGGGTTCAAGA |
| 12671 | CCGCCTCCCGGGTTCAAGAG |
| 12672 | CGCCTCCCGGGTTCAAGAGG |
| 12673 | GCCTCCCGGGTTCAAGAGGT |
| 12674 | CCTCCCGGGTTCAAGAGGTT |
| 12675 | CTCCCGGGTTCAAGAGGTTC |
| 12676 | TCCCGGGTTCAAGAGGTTCT |
| 12677 | CCCGGGTTCAAGAGGTTCTC |
| 12678 | CCGGGTTCAAGAGGTTCTCC |
| 12679 | CGGGTTCAAGAGGTTCTCCT |
| 12680 | GGGTTCAAGAGGTTCTCCTG |
| 12681 | GGTTCAAGAGGTTCTCCTGC |
| 12682 | GTTCAAGAGGTTCTCCTGCC |
| 12683 | TTCAAGAGGTTCTCCTGCCT |
| 12684 | TCAAGAGGTTCTCCTGCCTC |
| 12685 | CAAGAGGTTCTCCTGCCTCA |
| 12686 | AAGAGGTTCTCCTGCCTCAG |
| 12687 | AGAGGTTCTCCTGCCTCAGC |
| 12688 | GAGGTTCTCCTGCCTCAGCC |
| 12689 | AGGTTCTCCTGCCTCAGCCT |
| 12690 | GGTTCTCCTGCCTCAGCCTC |
| 12691 | GTTCTCCTGCCTCAGCCTCC |
| 12692 | TTCTCCTGCCTCAGCCTCCC |
| 12693 | TCTCCTGCCTCAGCCTCCCC |
| 12694 | CTCCTGCCTCAGCCTCCCCA |
| 12695 | TCCTGCCTCAGCCTCCCCAG |
| 12696 | CCTGCCTCAGCCTCCCCAGT |
| 12697 | CTGCCTCAGCCTCCCCAGTA |
| 12698 | TGCCTCAGCCTCCCCAGTAG |
| 12699 | GCCTCAGCCTCCCCAGTAGC |
| 12700 | CCTCAGCCTCCCCAGTAGCT |
| 12701 | CTCAGCCTCCCCAGTAGCTG |
| 12702 | TCAGCCTCCCCAGTAGCTGG |
| 12703 | CAGCCTCCCCAGTAGCTGGG |
| 12704 | AGCCTCCCCAGTAGCTGGGA |
| 12705 | GCCTCCCCAGTAGCTGGGAT |
| 12706 | CCTCCCCAGTAGCTGGGATT |
| 12707 | CTCCCCAGTAGCTGGGATTA |
| 12708 | TCCCCAGTAGCTGGGATTAC |
| 12709 | CCCCAGTAGCTGGGATTACA |
| 12710 | CCCAGTAGCTGGGATTACAG |
| 12711 | CCAGTAGCTGGGATTACAGG |
| 12712 | CAGTAGCTGGGATTACAGGC |
| 12713 | AGTAGCTGGGATTACAGGCG |
| 12714 | GTAGCTGGGATTACAGGCGC |
| 12715 | TAGCTGGGATTACAGGCGCC |
| 12716 | AGCTGGGATTACAGGCGCCC |
| 12717 | GCTGGGATTACAGGCGCCCA |
| 12718 | CTGGGATTACAGGCGCCCAC |
| 12719 | TGGGATTACAGGCGCCCACC |
| 12720 | GGGATTACAGGCGCCCACCA |
| 12721 | GGATTACAGGCGCCCACCAC |
| 12722 | GATTACAGGCGCCCACCACC |
| 12723 | ATTACAGGCGCCCACCACCA |
| 12724 | TTACAGGCGCCCACCACCAC |
| 12725 | TACAGGCGCCCACCACCACA |
| 12726 | ACAGGCGCCCACCACCACAC |
| 12727 | CAGGCGCCCACCACCACACC |
| 12728 | AGGCGCCCACCACCACACCC |
| 12729 | GGCGCCCACCACCACACCCA |
| 12730 | GCGCCCACCACCACACCCAG |
| 12731 | CGCCCACCACCACACCCAGC |
| 12732 | GCCCACCACCACACCCAGCT |
| 12733 | CCCACCACCACACCCAGCTA |
| 12734 | CCACCACCACACCCAGCTAA |
| 12735 | CACCACCACACCCAGCTAAT |
| 12736 | ACCACCACACCCAGCTAATT |
| 12737 | CCACCACACCCAGCTAATTT |
| 12738 | CACCACACCCAGCTAATTTT |
| 12739 | ACCACACCCAGCTAATTTTT |
| 12740 | CCACACCCAGCTAATTTTTG |
| 12741 | CACACCCAGCTAATTTTTGT |
| 12742 | ACACCCAGCTAATTTTTGTA |
| 12743 | CACCCAGCTAATTTTTGTAT |
| 12744 | ACCCAGCTAATTTTTGTATT |
| 12745 | CCCAGCTAATTTTTGTATTT |
| 12746 | CCAGCTAATTTTTGTATTTT |
| 12747 | CAGCTAATTTTTGTATTTTT |
| 12748 | AGCTAATTTTTGTATTTTTA |
| 12749 | GCTAATTTTTGTATTTTTAG |
| 12750 | CTAATTTTTGTATTTTTAGT |
| 12751 | TAATTTTTGTATTTTTAGTA |
| 12752 | AATTTTTGTATTTTTAGTAG |
| 12753 | ATTTTTGTATTTTTAGTAGA |
| 12754 | TTTTTGTATTTTTAGTAGAG |
| 12755 | TTTTGTATTTTTAGTAGAGA |
| 12756 | TTTGTATTTTTAGTAGAGAC |
| 12757 | TTGTATTTTTAGTAGAGACG |
| 12758 | TGTATTTTTAGTAGAGACGG |
| 12759 | GTATTTTTAGTAGAGACGGG |
| 12760 | TATTTTTAGTAGAGACGGGG |
| 12761 | ATTTTTAGTAGAGACGGGGT |
| 12762 | TTTTTAGTAGAGACGGGGTT |
| 12763 | TTTTAGTAGAGACGGGGTTT |
| 12764 | TTTAGTAGAGACGGGGTTTC |
| 12765 | TTAGTAGAGACGGGGTTTCA |
| 12766 | TAGTAGAGACGGGGTTTCAC |
| 12767 | AGTAGAGACGGGGTTTCACT |
| 12768 | GTAGAGACGGGGTTTCACTG |
| 12769 | TAGAGACGGGGTTTCACTGT |
| 12770 | AGAGACGGGGTTTCACTGTG |
| 12771 | GAGACGGGGTTTCACTGTGT |
| 12772 | AGACGGGGTTTCACTGTGTT |
| 12773 | GACGGGGTTTCACTGTGTTG |
| 12774 | ACGGGGTTTCACTGTGTTGG |
| 12775 | CGGGGTTTCACTGTGTTGGT |
| 12776 | GGGGTTTCACTGTGTTGGTC |
| 12777 | GGGTTTCACTGTGTTGGTCA |
| 12778 | GGTTTCACTGTGTTGGTCAG |
| 12779 | GTTTCACTGTGTTGGTCAGG |
| 12780 | TTTCACTGTGTTGGTCAGGC |
| 12781 | TTCACTGTGTTGGTCAGGCT |
| 12782 | TCACTGTGTTGGTCAGGCTG |
| 12783 | CACTGTGTTGGTCAGGCTGG |
| 12784 | ACTGTGTTGGTCAGGCTGGT |
| 12785 | CTGTGTTGGTCAGGCTGGTC |
| 12786 | TGTGTTGGTCAGGCTGGTCT |
| 12787 | GTGTTGGTCAGGCTGGTCTT |
| 12788 | TGTTGGTCAGGCTGGTCTTG |
| 12789 | GTTGGTCAGGCTGGTCTTGA |
| 12790 | TTGGTCAGGCTGGTCTTGAA |
| 12791 | TGGTCAGGCTGGTCTTGAAC |
| 12792 | GGTCAGGCTGGTCTTGAACT |
| 12793 | GTCAGGCTGGTCTTGAACTC |
| 12794 | TCAGGCTGGTCTTGAACTCC |
| 12795 | CAGGCTGGTCTTGAACTCCT |
| 12796 | AGGCTGGTCTTGAACTCCTG |
| 12797 | GGCTGGTCTTGAACTCCTGA |
| 12798 | GCTGGTCTTGAACTCCTGAC |
| 12799 | CTGGTCTTGAACTCCTGACC |
| 12800 | TGGTCTTGAACTCCTGACCT |
| 12801 | GGTCTTGAACTCCTGACCTC |
| 12802 | GTCTTGAACTCCTGACCTCA |
| 12803 | TCTTGAACTCCTGACCTCAG |
| 12804 | CTTGAACTCCTGACCTCAGG |
| 12805 | TTGAACTCCTGACCTCAGGT |
| 12806 | TGAACTCCTGACCTCAGGTG |
| 12807 | GAACTCCTGACCTCAGGTGA |
| 12808 | AACTCCTGACCTCAGGTGAT |
| 12809 | ACTCCTGACCTCAGGTGATC |
| 12810 | CTCCTGACCTCAGGTGATCC |
| 12811 | TCCTGACCTCAGGTGATCCA |
| 12812 | CCTGACCTCAGGTGATCCAC |
| 12813 | CTGACCTCAGGTGATCCACT |
| 12814 | TGACCTCAGGTGATCCACTG |
| 12815 | GACCTCAGGTGATCCACTGG |
| 12816 | ACCTCAGGTGATCCACTGGC |
| 12817 | CCTCAGGTGATCCACTGGCC |
| 12818 | CTCAGGTGATCCACTGGCCT |
| 12819 | TCAGGTGATCCACTGGCCTC |
| 12820 | CAGGTGATCCACTGGCCTCG |
| 12821 | AGGTGATCCACTGGCCTCGC |
| 12822 | GGTGATCCACTGGCCTCGCC |
| 12823 | GTGATCCACTGGCCTCGCCC |
| 12824 | TGATCCACTGGCCTCGCCCT |
| 12825 | GATCCACTGGCCTCGCCCTC |
| 12826 | ATCCACTGGCCTCGCCCTCC |
| 12827 | TCCACTGGCCTCGCCCTCCC |
| 12828 | CCACTGGCCTCGCCCTCCCA |
| 12829 | CACTGGCCTCGCCCTCCCAA |
| 12830 | ACTGGCCTCGCCCTCCCAAA |
| 12831 | CTGGCCTCGCCCTCCCAAAG |
| 12832 | TGGCCTCGCCCTCCCAAAGT |
| 12833 | GGCCTCGCCCTCCCAAAGTG |
| 12834 | GCCTCGCCCTCCCAAAGTGC |
| 12835 | CCTCGCCCTCCCAAAGTGCT |
| 12836 | CTCGCCCTCCCAAAGTGCTG |
| 12837 | TCGCCCTCCCAAAGTGCTGG |
| 12838 | CGCCCTCCCAAAGTGCTGGG |
| 12839 | GCCCTCCCAAAGTGCTGGGA |
| 12840 | CCCTCCCAAAGTGCTGGGAC |
| 12841 | CCTCCCAAAGTGCTGGGACT |
| 12842 | CTCCCAAAGTGCTGGGACTA |
| 12843 | TCCCAAAGTGCTGGGACTAC |
| 12844 | CCCAAAGTGCTGGGACTACA |
| 12845 | CCAAAGTGCTGGGACTACAA |
| 12846 | CAAAGTGCTGGGACTACAAG |
| 12847 | AAAGTGCTGGGACTACAAGC |
| 12848 | AAGTGCTGGGACTACAAGCG |
| 12849 | AGTGCTGGGACTACAAGCGT |
| 12850 | GTGCTGGGACTACAAGCGTG |
| 12851 | TGCTGGGACTACAAGCGTGA |
| 12852 | GCTGGGACTACAAGCGTGAG |
| 12853 | CTGGGACTACAAGCGTGAGT |
| 12854 | TGGGACTACAAGCGTGAGTC |
| 12855 | GGGACTACAAGCGTGAGTCA |
| 12856 | GGACTACAAGCGTGAGTCAC |
| 12857 | GACTACAAGCGTGAGTCACC |
| 12858 | ACTACAAGCGTGAGTCACCG |
| 12859 | CTACAAGCGTGAGTCACCGC |
| 12860 | TACAAGCGTGAGTCACCGCA |
| 12861 | ACAAGCGTGAGTCACCGCAC |
| 12862 | CAAGCGTGAGTCACCGCACC |
| 12863 | AAGCGTGAGTCACCGCACCT |
| 12864 | AGCGTGAGTCACCGCACCTG |
| 12865 | GCGTGAGTCACCGCACCTGG |
| 12866 | CGTGAGTCACCGCACCTGGC |
| 12867 | GTGAGTCACCGCACCTGGCT |
| 12868 | TGAGTCACCGCACCTGGCTT |
| 12869 | GAGTCACCGCACCTGGCTTT |
| 12870 | AGTCACCGCACCTGGCTTTA |
| 12871 | GTCACCGCACCTGGCTTTAT |
| 12872 | TCACCGCACCTGGCTTTATT |
| 12873 | CACCGCACCTGGCTTTATTT |
| 12874 | ACCGCACCTGGCTTTATTTT |
| 12875 | CCGCACCTGGCTTTATTTTT |
| 12876 | CGCACCTGGCTTTATTTTTA |
| 12877 | GCACCTGGCTTTATTTTTAT |
| 12878 | CACCTGGCTTTATTTTTATT |
| 12879 | ACCTGGCTTTATTTTTATTT |
| 12880 | CCTGGCTTTATTTTTATTTT |
| 12881 | CTGGCTTTATTTTTATTTTA |
| 12882 | TGGCTTTATTTTTATTTTAT |
| 12883 | GGCTTTATTTTTATTTTATC |
| 12884 | GCTTTATTTTTATTTTATCG |
| 12885 | CTTTATTTTTATTTTATCGC |
| 12886 | TTTATTTTTATTTTATCGCT |
| 12887 | TTATTTTTATTTTATCGCTA |
| 12888 | TATTTTTATTTTATCGCTAT |
| 12889 | ATTTTTATTTTATCGCTATT |
| 12890 | TTTTTATTTTATCGCTATTA |
| 12891 | TTTTATTTTATCGCTATTAT |
| 12892 | TTTATTTTATCGCTATTATT |
| 12893 | TTATTTTATCGCTATTATTT |
| 12894 | TATTTTATCGCTATTATTTT |
| 12895 | ATTTTATCGCTATTATTTTT |
| 12896 | TTTTATCGCTATTATTTTTT |
| 12897 | TTTATCGCTATTATTTTTTT |
| 12898 | TTATCGCTATTATTTTTTTG |
| 12899 | TATCGCTATTATTTTTTTGA |
| 12900 | ATCGCTATTATTTTTTTGAG |
| 12901 | TCGCTATTATTTTTTTGAGG |
| 12902 | CGCTATTATTTTTTTGAGGA |
| 12903 | GCTATTATTTTTTTGAGGAG |
| 12904 | CTATTATTTTTTTGAGGAGT |
| 12905 | TATTATTTTTTTGAGGAGTC |
| 12906 | ATTATTTTTTTGAGGAGTCT |
| 12907 | TTATTTTTTTGAGGAGTCTC |
| 12908 | TATTTTTTTGAGGAGTCTCA |
| 12909 | ATTTTTTTGAGGAGTCTCAC |
| 12910 | TTTTTTTGAGGAGTCTCACT |
| 12911 | TTTTTTGAGGAGTCTCACTC |
| 12912 | TTTTTGAGGAGTCTCACTCT |
| 12913 | TTTTGAGGAGTCTCACTCTG |
| 12914 | TTTGAGGAGTCTCACTCTGT |
| 12915 | TTGAGGAGTCTCACTCTGTT |
| 12916 | TGAGGAGTCTCACTCTGTTG |
| 12917 | GAGGAGTCTCACTCTGTTGC |
| 12918 | AGGAGTCTCACTCTGTTGCC |
| 12919 | GGAGTCTCACTCTGTTGCCC |
| 12920 | GAGTCTCACTCTGTTGCCCA |
| 12921 | AGTCTCACTCTGTTGCCCAG |
| 12922 | GTCTCACTCTGTTGCCCAGG |
| 12923 | TCTCACTCTGTTGCCCAGGC |
| 12924 | CTCACTCTGTTGCCCAGGCT |
| 12925 | TCACTCTGTTGCCCAGGCTG |
| 12926 | CACTCTGTTGCCCAGGCTGG |
| 12927 | ACTCTGTTGCCCAGGCTGGA |
| 12928 | CTCTGTTGCCCAGGCTGGAG |
| 12929 | TCTGTTGCCCAGGCTGGAGT |
| 12930 | CTGTTGCCCAGGCTGGAGTG |
| 12931 | TGTTGCCCAGGCTGGAGTGC |
| 12932 | GTTGCCCAGGCTGGAGTGCA |
| 12933 | TTGCCCAGGCTGGAGTGCAG |
| 12934 | TGCCCAGGCTGGAGTGCAGT |
| 12935 | GCCCAGGCTGGAGTGCAGTG |
| 12936 | CCCAGGCTGGAGTGCAGTGC |
| 12937 | CCAGGCTGGAGTGCAGTGCT |
| 12938 | CAGGCTGGAGTGCAGTGCTG |
| 12939 | AGGCTGGAGTGCAGTGCTGC |
| 12940 | GGCTGGAGTGCAGTGCTGCG |
| 12941 | GCTGGAGTGCAGTGCTGCGA |
| 12942 | CTGGAGTGCAGTGCTGCGAT |
| 12943 | TGGAGTGCAGTGCTGCGATC |
| 12944 | GGAGTGCAGTGCTGCGATCT |
| 12945 | GAGTGCAGTGCTGCGATCTC |
| 12946 | AGTGCAGTGCTGCGATCTCG |
| 12947 | GTGCAGTGCTGCGATCTCGG |
| 12948 | TGCAGTGCTGCGATCTCGGC |
| 12949 | GCAGTGCTGCGATCTCGGCT |
| 12950 | CAGTGCTGCGATCTCGGCTC |
| 12951 | AGTGCTGCGATCTCGGCTCA |
| 12952 | GTGCTGCGATCTCGGCTCAC |
| 12953 | TGCTGCGATCTCGGCTCACT |
| 12954 | GCTGCGATCTCGGCTCACTG |
| 12955 | CTGCGATCTCGGCTCACTGC |
| 12956 | TGCGATCTCGGCTCACTGCA |
| 12957 | GCGATCTCGGCTCACTGCAA |
| 12958 | CGATCTCGGCTCACTGCAAC |
| 12959 | GATCTCGGCTCACTGCAACC |
| 12960 | ATCTCGGCTCACTGCAACCT |
| 12961 | TCTCGGCTCACTGCAACCTC |
| 12962 | CTCGGCTCACTGCAACCTCT |
| 12963 | TCGGCTCACTGCAACCTCTG |
| 12964 | CGGCTCACTGCAACCTCTGC |
| 12965 | GGCTCACTGCAACCTCTGCC |
| 12966 | GCTCACTGCAACCTCTGCCT |
| 12967 | CTCACTGCAACCTCTGCCTC |
| 12968 | TCACTGCAACCTCTGCCTCC |
| 12969 | CACTGCAACCTCTGCCTCCC |
| 12970 | ACTGCAACCTCTGCCTCCCG |
| 12971 | CTGCAACCTCTGCCTCCCGG |
| 12972 | TGCAACCTCTGCCTCCCGGG |
| 12973 | GCAACCTCTGCCTCCCGGGT |
| 12974 | CAACCTCTGCCTCCCGGGTT |
| 12975 | AACCTCTGCCTCCCGGGTTC |
| 12976 | ACCTCTGCCTCCCGGGTTCA |
| 12977 | CCTCTGCCTCCCGGGTTCAA |
| 12978 | CTCTGCCTCCCGGGTTCAAG |
| 12979 | TCTGCCTCCCGGGTTCAAGA |
| 12980 | CTGCCTCCCGGGTTCAAGAG |
| 12981 | TGCCTCCCGGGTTCAAGAGA |
| 12982 | GCCTCCCGGGTTCAAGAGAT |
| 12983 | CCTCCCGGGTTCAAGAGATT |
| 12984 | CTCCCGGGTTCAAGAGATTC |
| 12985 | TCCCGGGTTCAAGAGATTCT |
| 12986 | CCCGGGTTCAAGAGATTCTC |
| 12987 | CCGGGTTCAAGAGATTCTCC |
| 12988 | CGGGTTCAAGAGATTCTCCT |
| 12989 | GGGTTCAAGAGATTCTCCTG |
| 12990 | GGTTCAAGAGATTCTCCTGC |
| 12991 | GTTCAAGAGATTCTCCTGCC |
| 12992 | TTCAAGAGATTCTCCTGCCT |
| 12993 | TCAAGAGATTCTCCTGCCTC |
| 12994 | CAAGAGATTCTCCTGCCTCA |
| 12995 | AAGAGATTCTCCTGCCTCAG |
| 12996 | AGAGATTCTCCTGCCTCAGC |
| 12997 | GAGATTCTCCTGCCTCAGCC |
| 12998 | AGATTCTCCTGCCTCAGCCT |
| 12999 | GATTCTCCTGCCTCAGCCTC |
| 13000 | ATTCTCCTGCCTCAGCCTCC |
| 13001 | TTCTCCTGCCTCAGCCTCCC |
| 13002 | TCTCCTGCCTCAGCCTCCCA |
| 13003 | CTCCTGCCTCAGCCTCCCAA |
| 13004 | TCCTGCCTCAGCCTCCCAAG |
| 13005 | CCTGCCTCAGCCTCCCAAGT |
| 13006 | CTGCCTCAGCCTCCCAAGTA |
| 13007 | TGCCTCAGCCTCCCAAGTAG |
| 13008 | GCCTCAGCCTCCCAAGTAGC |
| 13009 | CCTCAGCCTCCCAAGTAGCT |
| 13010 | CTCAGCCTCCCAAGTAGCTG |
| 13011 | TCAGCCTCCCAAGTAGCTGG |
| 13012 | CAGCCTCCCAAGTAGCTGGG |
| 13013 | AGCCTCCCAAGTAGCTGGGA |
| 13014 | GCCTCCCAAGTAGCTGGGAT |
| 13015 | CCTCCCAAGTAGCTGGGATT |
| 13016 | CTCCCAAGTAGCTGGGATTA |
| 13017 | TCCCAAGTAGCTGGGATTAC |
| 13018 | CCCAAGTAGCTGGGATTACA |
| 13019 | CCAAGTAGCTGGGATTACAG |
| 13020 | CAAGTAGCTGGGATTACAGG |
| 13021 | AAGTAGCTGGGATTACAGGC |
| 13022 | AGTAGCTGGGATTACAGGCA |
| 13023 | GTAGCTGGGATTACAGGCAT |
| 13024 | TAGCTGGGATTACAGGCATG |
| 13025 | AGCTGGGATTACAGGCATGC |
| 13026 | GCTGGGATTACAGGCATGCA |
| 13027 | CTGGGATTACAGGCATGCAC |
| 13028 | TGGGATTACAGGCATGCACA |
| 13029 | GGGATTACAGGCATGCACAC |
| 13030 | GGATTACAGGCATGCACACC |
| 13031 | GATTACAGGCATGCACACCA |
| 13032 | ATTACAGGCATGCACACCAT |
| 13033 | TTACAGGCATGCACACCATG |
| 13034 | TACAGGCATGCACACCATGC |
| 13035 | ACAGGCATGCACACCATGCC |
| 13036 | CAGGCATGCACACCATGCCA |
| 13037 | AGGCATGCACACCATGCCAG |
| 13038 | GGCATGCACACCATGCCAGG |
| 13039 | GCATGCACACCATGCCAGGC |
| 13040 | CATGCACACCATGCCAGGCT |
| 13041 | ATGCACACCATGCCAGGCTA |
| 13042 | TGCACACCATGCCAGGCTAA |
| 13043 | GCACACCATGCCAGGCTAAT |
| 13044 | CACACCATGCCAGGCTAATT |
| 13045 | ACACCATGCCAGGCTAATTT |
| 13046 | CACCATGCCAGGCTAATTTT |
| 13047 | ACCATGCCAGGCTAATTTTT |
| 13048 | CCATGCCAGGCTAATTTTTT |
| 13049 | CATGCCAGGCTAATTTTTTG |
| 13050 | ATGCCAGGCTAATTTTTTGT |
| 13051 | TGCCAGGCTAATTTTTTGTA |
| 13052 | GCCAGGCTAATTTTTTGTAT |
| 13053 | CCAGGCTAATTTTTTGTATT |
| 13054 | CAGGCTAATTTTTTGTATTT |
| 13055 | AGGCTAATTTTTTGTATTTT |
| 13056 | GGCTAATTTTTTGTATTTTT |
| 13057 | GCTAATTTTTTGTATTTTTA |
| 13058 | CTAATTTTTTGTATTTTTAG |
| 13059 | TAATTTTTTGTATTTTTAGT |
| 13060 | AATTTTTTGTATTTTTAGTA |
| 13061 | ATTTTTTGTATTTTTAGTAG |
| 13062 | TTTTTTGTATTTTTAGTAGA |
| 13063 | TTTTTGTATTTTTAGTAGAG |
| 13064 | TTTTGTATTTTTAGTAGAGA |
| 13065 | TTTGTATTTTTAGTAGAGAC |
| 13066 | TTGTATTTTTAGTAGAGACG |
| 13067 | TGTATTTTTAGTAGAGACGA |
| 13068 | GTATTTTTAGTAGAGACGAG |
| 13069 | TATTTTTAGTAGAGACGAGG |
| 13070 | ATTTTTAGTAGAGACGAGGT |
| 13071 | TTTTTAGTAGAGACGAGGTT |
| 13072 | TTTTAGTAGAGACGAGGTTT |
| 13073 | TTTAGTAGAGACGAGGTTTC |
| 13074 | TTAGTAGAGACGAGGTTTCT |
| 13075 | TAGTAGAGACGAGGTTTCTC |
| 13076 | AGTAGAGACGAGGTTTCTCC |
| 13077 | GTAGAGACGAGGTTTCTCCA |
| 13078 | TAGAGACGAGGTTTCTCCAT |
| 13079 | AGAGACGAGGTTTCTCCATG |
| 13080 | GAGACGAGGTTTCTCCATGT |
| 13081 | AGACGAGGTTTCTCCATGTT |
| 13082 | GACGAGGTTTCTCCATGTTG |
| 13083 | ACGAGGTTTCTCCATGTTGG |
| 13084 | CGAGGTTTCTCCATGTTGGC |
| 13085 | GAGGTTTCTCCATGTTGGCC |
| 13086 | AGGTTTCTCCATGTTGGCCA |
| 13087 | GGTTTCTCCATGTTGGCCAG |
| 13088 | GTTTCTCCATGTTGGCCAGG |
| 13089 | TTTCTCCATGTTGGCCAGGC |
| 13090 | TTCTCCATGTTGGCCAGGCT |
| 13091 | TCTCCATGTTGGCCAGGCTA |
| 13092 | CTCCATGTTGGCCAGGCTAG |
| 13093 | TCCATGTTGGCCAGGCTAGT |
| 13094 | CCATGTTGGCCAGGCTAGTC |
| 13095 | CATGTTGGCCAGGCTAGTCT |
| 13096 | ATGTTGGCCAGGCTAGTCTC |
| 13097 | TGTTGGCCAGGCTAGTCTCG |
| 13098 | GTTGGCCAGGCTAGTCTCGA |
| 13099 | TTGGCCAGGCTAGTCTCGAC |
| 13100 | TGGCCAGGCTAGTCTCGACA |
| 13101 | GGCCAGGCTAGTCTCGACAG |
| 13102 | GCCAGGCTAGTCTCGACAGC |
| 13103 | CCAGGCTAGTCTCGACAGCA |
| 13104 | CAGGCTAGTCTCGACAGCAG |
| 13105 | AGGCTAGTCTCGACAGCAGG |
| 13106 | GGCTAGTCTCGACAGCAGGT |
| 13107 | GCTAGTCTCGACAGCAGGTG |
| 13108 | CTAGTCTCGACAGCAGGTGG |
| 13109 | TAGTCTCGACAGCAGGTGGA |
| 13110 | AGTCTCGACAGCAGGTGGAG |
| 13111 | GTCTCGACAGCAGGTGGAGG |
| 13112 | TCTCGACAGCAGGTGGAGGC |
| 13113 | CTCGACAGCAGGTGGAGGCT |
| 13114 | TCGACAGCAGGTGGAGGCTC |
| 13115 | CGACAGCAGGTGGAGGCTCC |
| 13116 | GACAGCAGGTGGAGGCTCCG |
| 13117 | ACAGCAGGTGGAGGCTCCGT |
| 13118 | CAGCAGGTGGAGGCTCCGTG |
| 13119 | AGCAGGTGGAGGCTCCGTGA |
| 13120 | GCAGGTGGAGGCTCCGTGAG |
| 13121 | CAGGTGGAGGCTCCGTGAGC |
| 13122 | AGGTGGAGGCTCCGTGAGCC |
| 13123 | GGTGGAGGCTCCGTGAGCCA |
| 13124 | GTGGAGGCTCCGTGAGCCAC |
| 13125 | TGGAGGCTCCGTGAGCCACT |
| 13126 | GGAGGCTCCGTGAGCCACTG |
| 13127 | GAGGCTCCGTGAGCCACTGC |
| 13128 | AGGCTCCGTGAGCCACTGCG |
| 13129 | GGCTCCGTGAGCCACTGCGC |
| 13130 | GCTCCGTGAGCCACTGCGCC |
| 13131 | CTCCGTGAGCCACTGCGCCC |
| 13132 | TCCGTGAGC CACTGCGCCCG |
| 13133 | CCGTGAGCCACTGCGCCCGG |
| 13134 | CGTGAGCCACTGCGCCCGGT |
| 13135 | GTGAGCCACTGCGCCCGGTC |
| 13136 | TGAGCCACTGCGCCCGGTCG |
| 13137 | GAGCCACTGCGCCCGGTCGT |
| 13138 | AGCCACTGCGCCCGGTCGTT |
| 13139 | GCCACTGCGCCCGGTCGTTT |
| 13140 | CCACTGCGCCCGGTCGTTTT |
| 13141 | CACTGCGCCCGGTCGTTTTT |
| 13142 | ACTGCGCCCGGTCGTTTTTT |
| 13143 | CTGCGCCCGGTCGTTTTTTA |
| 13144 | TGCGCCCGGTCGTTTTTTAA |
| 13145 | GCGCCCGGTCGTTTTTTAAT |
| 13146 | CGCCCGGTCGTTTTTTAATT |
| 13147 | GCCCGGTCGTTTTTTAATTT |
| 13148 | CCCGGTCGTTTTTTAATTTT |
| 13149 | CCGGTCGTTTTTTAATTTTA |
| 13150 | CGGTCGTTTTTTAATTTTAT |
| 13151 | GGTCGTTTTTTAATTTTATA |
| 13152 | GTCGTTTTTTAATTTTATAT |
| 13153 | TCGTTTTTTAATTTTATATT |
| 13154 | CGTTTTTTAATTTTATATTT |
| 13155 | GTTTTTTAATTTTATATTTA |
| 13156 | TTTTTTAATTTTATATTTAT |
| 13157 | TTTTTAATTTTATATTTATT |
| 13158 | TTTTAATTTTATATTTATTT |
| 13159 | TTTAATTTTATATTTATTTT |
| 13160 | TTAATTTTATATTTATTTTA |
| 13161 | TAATTTTATATTTATTTTAT |
| 13162 | AATTTTATATTTATTTTATT |
| 13163 | ATTTTATATTTATTTTATTT |
| 13164 | TTTTATATTTATTTTATTTT |
| 13165 | TTTATATTTATTTTATTTTA |
| 13166 | TTATATTTATTTTATTTTAT |
| 13167 | TATATTTATTTTATTTTATT |
| 13168 | ATATTTATTTTATTTTATTT |
| 13169 | TATTTATTTTATTTTATTTT |
| 13170 | ATTTATTTTATTTTATTTTA |
| 13171 | TTTATTTTATTTTATTTTAT |
| 13172 | TTATTTTATTTTATTTTATT |
| 13173 | TATTTTATTTTATTTTATTT |
| 13174 | ATTTTATTTTATTTTATTTA |
| 13175 | TTTTATTTTATTTTATTTAT |
| 13176 | TTTATTTTATTTTATTTATT |
| 13177 | TTATTTTATTTTATTTATTT |
| 13178 | TATTTTATTTTATTTATTTT |
| 13179 | ATTTTATTTTATTTATTTTG |
| 13180 | TTTTATTTTATTTATTTTGT |
| 13181 | TTTATTTTATTTATTTTGTG |
| 13182 | TTATTTTATTTATTTTGTGT |
| 13183 | TATTTTATTTATTTTGTGTG |
| 13184 | ATTTTATTTATTTTGTGTGT |
| 13185 | TTTTATTTATTTTGTGTGTG |
| 13186 | TTTATTTATTTTGTGTGTGT |
| 13187 | TTATTTATTTTGTGTGTGTG |
| 13188 | TATTTATTTTGTGTGTGTGT |
| 13189 | ATTTATTTTGTGTGTGTGTG |
| 13190 | TTTATTTTGTGTGTGTGTGT |
| 13191 | TTATTTTGTGTGTGTGTGTG |
| 13192 | TATTTTGTGTGTGTGTGTGT |
| 13193 | ATTTTGTGTGTGTGTGTGTG |
| 13194 | TTTTGTGTGTGTGTGTGTGT |
| 13195 | TTTGTGTGTGTGTGTGTGTG |
| 13196 | TTGTGTGTGTGTGTGTGTGT |
| 13197 | TGTGTGTGTGTGTGTGTGTG |
| 13198 | GTGTGTGTGTGTGTGTGTGT |
| 13199 | TGTGTGTGTGTGTGTGTGTG |
| 13200 | GTGTGTGTGTGTGTGTGTGT |
| 13201 | TGTGTGTGTGTGTGTGTGTA |
| 13202 | GTGTGTGTGTGTGTGTGTAG |
| 13203 | TGTGTGTGTGTGTGTGTAGA |
| 13204 | GTGTGTGTGTGTGTGTAGAA |
| 13205 | TGTGTGTGTGTGTGTAGAAG |
| 13206 | GTGTGTGTGTGTGTAGAAGA |
| 13207 | TGTGTGTGTGTGTAGAAGAG |
| 13208 | GTGTGTGTGTGTAGAAGAGA |
| 13209 | TGTGTGTGTGTAGAAGAGAC |
| 13210 | GTGTGTGTGTAGAAGAGACG |
| 13211 | TGTGTGTGTAGAAGAGACGG |
| 13212 | GTGTGTGTAGAAGAGACGGG |
| 13213 | TGTGTGTAGAAGAGACGGGG |
| 13214 | GTGTGTAGAAGAGACGGGGG |
| 13215 | TGTGTAGAAGAGACGGGGGT |
| 13216 | GTGTAGAAGAGACGGGGGTC |
| 13217 | TGTAGAAGAGACGGGGGTCT |
| 13218 | GTAGAAGAGACGGGGGTCTC |
| 13219 | TAGAAGAGACGGGGGTCTCG |
| 13220 | AGAAGAGACGGGGGTCTCGC |
| 13221 | GAAGAGACGGGGGTCTCGCT |
| 13222 | AAGAGACGGGGGTCTCGCTA |
| 13223 | AGAGACGGGGGTCTCGCTAT |
| 13224 | GAGACGGGGGTCTCGCTATT |
| 13225 | AGACGGGGGTCTCGCTATTT |
| 13226 | GACGGGGGTCTCGCTATTTT |
| 13227 | ACGGGGGTCTCGCTATTTTG |
| 13228 | CGGGGGTCTCGCTATTTTGC |
| 13229 | GGGGGTCTCGCTATTTTGCT |
| 13230 | GGGGTCTCGCTATTTTGCTT |
| 13231 | GGGTCTCGCTATTTTGCTTT |
| 13232 | GGTCTCGCTATTTTGCTTTA |
| 13233 | GTCTCGCTATTTTGCTTTAG |
| 13234 | TCTCGCTATTTTGCTTTAGG |
| 13235 | CTCGCTATTTTGCTTTAGGT |
| 13236 | TCGCTATTTTGCTTTAGGTG |
| 13237 | CGCTATTTTGCTTTAGGTGG |
| 13238 | GCTATTTTGCTTTAGGTGGT |
| 13239 | CTATTTTGCTTTAGGTGGTC |
| 13240 | TATTTTGCTTTAGGTGGTCT |
| 13241 | ATTTTGCTTTAGGTGGTCTT |
| 13242 | TTTTGCTTTAGGTGGTCTTG |
| 13243 | TTTGCTTTAGGTGGTCTTGA |
| 13244 | TTGCTTTAGGTGGTCTTGAA |
| 13245 | TGCTTTAGGTGGTCTTGAAT |
| 13246 | GCTTTAGGTGGTCTTGAATT |
| 13247 | CTTTAGGTGGTCTTGAATTC |
| 13248 | TTTAGGTGGTCTTGAATTCC |
| 13249 | TTAGGTGGTCTTGAATTCCT |
| 13250 | TAGGTGGTCTTGAATTCCTG |
| 13251 | AGGTGGTCTTGAATTCCTGG |
| 13252 | GGTGGTCTTGAATTCCTGGC |
| 13253 | GTGGTCTTGAATTCCTGGCC |
| 13254 | TGGTCTTGAATTCCTGGCCT |
| 13255 | GGTCTTGAATTCCTGGCCTT |
| 13256 | GTCTTGAATTCCTGGCCTTG |
| 13257 | TCTTGAATTCCTGGCCTTGA |
| 13258 | CTTGAATTCCTGGCCTTGAG |
| 13259 | TTGAATTCCTGGCCTTGAGC |
| 13260 | TGAATTCCTGGCCTTGAGCG |
| 13261 | GAATTCCTGGCCTTGAGCGA |
| 13262 | AATTCCTGGCCTTGAGCGAA |
| 13263 | ATTCCTGGCCTTGAGCGAAC |
| 13264 | TTCCTGGCCTTGAGCGAACC |
| 13265 | TCCTGGCCTTGAGCGAACCT |
| 13266 | CCTGGCCTTGAGCGAACCTC |
| 13267 | CTGGCCTTGAGCGAACCTCC |
| 13268 | TGGCCTTGAGCGAACCTCCC |
| 13269 | GGCCTTGAGCGAACCTCCCT |
| 13270 | GCCTTGAGCGAACCTCCCTC |
| 13271 | CCTTGAGCGAACCTCCCTCC |
| 13272 | CTTGAGCGAACCTCCCTCCT |
| 13273 | TTGAGCGAACCTCCCTCCTC |
| 13274 | TGAGCGAACCTCCCTCCTCG |
| 13275 | GAGCGAACCTCCCTCCTCGG |
| 13276 | AGCGAACCTCCCTCCTCGGC |
| 13277 | GCGAACCTCCCTCCTCGGCT |
| 13278 | CGAACCTCCCTCCTCGGCTT |
| 13279 | GAACCTCCCTCCTCGGCTTC |
| 13280 | AACCTCCCTCCTCGGCTTCC |
| 13281 | ACCTCCCTCCTCGGCTTCCT |
| 13282 | CCTCCCTCCTCGGCTTCCTA |
| 13283 | CTCCCTCCTCGGCTTCCTAA |
| 13284 | TCCCTCCTCGGCTTCCTAAG |
| 13285 | CCCTCCTCGGCTTCCTAAGG |
| 13286 | CCTCCTCGGCTTCCTAAGGG |
| 13287 | CTCCTCGGCTTCCTAAGGGG |
| 13288 | TCCTCGGCTTCCTAAGGGGG |
| 13289 | CCTCGGCTTCCTAAGGGGGG |
| 13290 | CTCGGCTTCCTAAGGGGGGA |
| 13291 | TCGGCTTCCTAAGGGGGGAG |
| 13292 | CGGCTTCCTAAGGGGGGAGC |
| 13293 | GGCTTCCTAAGGGGGGAGCC |
| 13294 | GCTTCCTAAGGGGGGAGCCC |
| 13295 | CTTCCTAAGGGGGGAGCCCA |
| 13296 | TTCCTAAGGGGGGAGCCCAT |
| 13297 | TCCTAAGGGGGGAGCCCATC |
| 13298 | CCTAAGGGGGGAGCCCATCC |
| 13299 | CTAAGGGGGGAGCCCATCCC |
| 13300 | TAAGGGGGGAGCCCATCCCT |
| 13301 | AAGGGGGGAGCCCATCCCTT |
| 13302 | AGGGGGGAGCCCATCCCTTG |
| 13303 | GGGGGGAGCCCATCCCTTGA |
| 13304 | GGGGGAGCCCATCCCTTGAC |
| 13305 | GGGGAGCCCATCCCTTGACG |
| 13306 | GGGAGCCCATCCCTTGACGC |
| 13307 | GGAGCCCATCCCTTGACGCA |
| 13308 | GAGCCCATCCCTTGACGCAG |
| 13309 | AGCCCATCCCTTGACGCAGG |
| 13310 | GCCCATCCCTTGACGCAGGG |
| 13311 | CCCATCCCTTGACGCAGGGA |
| 13312 | CCATCCCTTGACGCAGGGAA |
| 13313 | CATCCCTTGACGCAGGGAAG |
| 13314 | ATCCCTTGACGCAGGGAAGC |
| 13315 | TCCCTTGACGCAGGGAAGCC |
| 13316 | CCCTTGACGCAGGGAAGCCC |
| 13317 | CCTTGACGCAGGGAAGCCCA |
| 13318 | CTTGACGCAGGGAAGCCCAG |
| 13319 | TTGACGCAGGGAAGCCCAGG |
| 13320 | TGACGCAGGGAAGCCCAGGG |
| 13321 | GACGCAGGGAAGCCCAGGGA |
| 13322 | ACGCAGGGAAGCCCAGGGAG |
| 13323 | CGCAGGGAAGCCCAGGGAGC |
| 13324 | GCAGGGAAGCCCAGGGAGCC |
| 13325 | CAGGGAAGCCCAGGGAGCCA |
| 13326 | AGGGAAGCCCAGGGAGCCAC |
| 13327 | GGGAAGCCCAGGGAGCCACA |
| 13328 | GGAAGCCCAGGGAGCCACAG |
| 13329 | GAAGCCCAGGGAGCCACAGT |
| 13330 | AAGCCCAGGGAGCCACAGTT |
| 13331 | AGCCCAGGGAGCCACAGTTG |
| 13332 | GCCCAGGGAGCCACAGTTGC |
| 13333 | CCCAGGGAGCCACAGTTGCG |
| 13334 | CCAGGGAGCCACAGTTGCGC |
| 13335 | CAGGGAGCCACAGTTGCGCA |
| 13336 | AGGGAGCCACAGTTGCGCAC |
| 13337 | GGGAGCCACAGTTGCGCACC |
| 13338 | GGAGCCACAGTTGCGCACCC |
| 13339 | GAGCCACAGTTGCGCACCCC |
| 13340 | AGCCACAGTTGCGCACCCCG |
| 13341 | GCCACAGTTGCGCACCCCGC |
| 13342 | CCACAGTTGCGCACCCCGCC |
| 13343 | CACAGTTGCGCACCCCGCCC |
| 13344 | ACAGTTGCGCACCCCGCCCC |
| 13345 | CAGTTGCGCACCCCGCCCCC |
| 13346 | AGTTGCGCACCCCGCCCCCA |
| 13347 | GTTGCGCACCCCGCCCCCAC |
| 13348 | TTGCGCACCCCGCCCCCACG |
| 13349 | TGCGCACCCCGCCCCCACGC |
| 13350 | GCGCACCCCGCCCCCACGCC |
| 13351 | CGCACCCCGCCCCCACGCCC |
| 13352 | GCACCCCGCCCCCACGCCCC |
| 13353 | CACCCCGCCCCCACGCCCCA |
| 13354 | ACCCCGCCCCCACGCCCCAC |
| 13355 | CCCCGCCCCCACGCCCCACT |
| 13356 | CCCGCCCCCACGCCCCACTC |
| 13357 | CCGCCCCCACGCCCCACTCC |
| 13358 | CGCCCCCACGCCCCACTCCT |
| 13359 | GCCCCCACGCCCCACTCCTG |
| 13360 | CCCCCACGCCCCACTCCTGT |
| 13361 | CCCCACGCCCCACTCCTGTC |
| 13362 | CCCACGCCCCACTCCTGTCC |
| 13363 | CCACGCCCCACTCCTGTCCA |
| 13364 | CACGCCCCACTCCTGTCCAT |
| 13365 | ACGCCCCACTCCTGTCCATA |
| 13366 | CGCCCCACTCCTGTCCATAC |
| 13367 | GCCCCACTCCTGTCCATACC |
| 13368 | CCCCACTCCTGTCCATACCC |
| 13369 | CCCACTCCTGTCCATACCCT |
| 13370 | CCACTCCTGTCCATACCCTT |
| 13371 | CACTCCTGTCCATACCCTTC |
| 13372 | ACTCCTGTCCATACCCTTCC |
| 13373 | CTCCTGTCCATACCCTTCCA |
| 13374 | TCCTGTCCATACCCTTCCAA |
| 13375 | CCTGTCCATACCCTTCCAAG |
| 13376 | CTGTCCATACCCTTCCAAGC |
| 13377 | TGTCCATACCCTTCCAAGCC |
| 13378 | GTCCATACCCTTCCAAGCCA |
| 13379 | TCCATACCCTTCCAAGCCAG |
| 13380 | CCATACCCTTCCAAGCCAGG |
| 13381 | CATACCCTTCCAAGCCAGGA |
| 13382 | ATACCCTTCCAAGCCAGGAG |
| 13383 | TACCCTTCCAAGCCAGGAGA |
| 13384 | ACCCTTCCAAGCCAGGAGAG |
| 13385 | CCCTTCCAAGCCAGGAGAGC |
| 13386 | CCTTCCAAGCCAGGAGAGCC |
| 13387 | CTTCCAAGCCAGGAGAGCCA |
| 13388 | TTCCAAGCCAGGAGAGCCAC |
| 13389 | TCCAAGCCAGGAGAGCCACT |
| 13390 | CCAAGCCAGGAGAGCCACTA |
| 13391 | CAAGCCAGGAGAGCCACTAG |
| 13392 | AAGCCAGGAGAGCCACTAGG |
| 13393 | AGCCAGGAGAGCCACTAGGG |
| 13394 | GCCAGGAGAGCCACTAGGGG |
| 13395 | CCAGGAGAGCCACTAGGGGC |
| 13396 | CAGGAGAGCCACTAGGGGCG |
| 13397 | AGGAGAGCCACTAGGGGCGC |
| 13398 | GGAGAGCCACTAGGGGCGCG |
| 13399 | GAGAGCCACTAGGGGCGCGG |
| 13400 | AGAGCCACTAGGGGCGCGGA |
| 13401 | GAGCCACTAGGGGCGCGGAG |
| 13402 | AGCCACTAGGGGCGCGGAGA |
| 13403 | GCCACTAGGGGCGCGGAGAA |
| 13404 | CCACTAGGGGCGCGGAGAAC |
| 13405 | CACTAGGGGCGCGGAGAACC |
| 13406 | ACTAGGGGCGCGGAGAACCA |
| 13407 | CTAGGGGCGCGGAGAACCAG |
| 13408 | TAGGGGCGCGGAGAACCAGC |
| 13409 | AGGGGCGCGGAGAACCAGCC |
| 13410 | GGGGCGCGGAGAACCAGCCC |
| 13411 | GGGCGCGGAGAACCAGCCCT |
| 13412 | GGCGCGGAGAACCAGCCCTG |
| 13413 | GCGCGGAGAACCAGCCCTGG |
| 13414 | CGCGGAGAACCAGCCCTGGG |
| 13415 | GCGGAGAACCAGCCCTGGGG |
| 13416 | CGGAGAACCAGCCCTGGGGA |
| 13417 | GGAGAACCAGCCCTGGGGAC |
| 13418 | GAGAACCAGCCCTGGGGACA |
| 13419 | AGAACCAGCCCTGGGGACAC |
| 13420 | GAACCAGCCCTGGGGACACG |
| 13421 | AACCAGCCCTGGGGACACGT |
| 13422 | ACCAGCCCTGGGGACACGTA |
| 13423 | CCAGCCCTGGGGACACGTAC |
| 13424 | CAGCCCTGGGGACACGTACC |
| 13425 | AGCCCTGGGGACACGTACCT |
| 13426 | GCCCTGGGGACACGTACCTG |
| 13427 | CCCTGGGGACACGTACCTGC |
| 13428 | CCTGGGGACACGTACCTGCA |
| 13429 | CTGGGGACACGTACCTGCAG |
| 13430 | TGGGGACACGTACCTGCAGG |
| 13431 | GGGGACACGTACCTGCAGGC |
| 13432 | GGGACACGTACCTGCAGGCT |
| 13433 | GGACACGTACCTGCAGGCTG |
| 13434 | GACACGTACCTGCAGGCTGT |
| 13435 | ACACGTACCTGCAGGCTGTG |
| 13436 | CACGTACCTGCAGGCTGTGA |
| 13437 | ACGTACCTGCAGGCTGTGAA |
| 13438 | CGTACCTGCAGGCTGTGAAG |
| 13439 | GTACCTGCAGGCTGTGAAGG |
| 13440 | TACCTGCAGGCTGTGAAGGA |
| 13441 | ACCTGCAGGCTGTGAAGGAC |
| 13442 | CCTGCAGGCTGTGAAGGACC |
| 13443 | CTGCAGGCTGTGAAGGACCT |
| 13444 | TGCAGGCTGTGAAGGACCTC |
| 13445 | GCAGGCTGTGAAGGACCTCA |
| 13446 | CAGGCTGTGAAGGACCTCAG |
| 13447 | AGGCTGTGAAGGACCTCAGG |
| 13448 | GGCTGTGAAGGACCTCAGGG |
| 13449 | GCTGTGAAGGACCTCAGGGT |
| 13450 | CTGTGAAGGACCTCAGGGTC |
| 13451 | TGTGAAGGACCTCAGGGTCC |
| 13452 | GTGAAGGACCTCAGGGTCCA |
| 13453 | TGAAGGACCTCAGGGTCCAC |
| 13454 | GAAGGACCTCAGGGTCCACC |
| 13455 | AAGGACCTCAGGGTCCACCC |
| 13456 | AGGACCTCAGGGTCCACCCG |
| 13457 | GGACCTCAGGGTCCACCCGG |
| 13458 | GACCTCAGGGTCCACCCGGC |
| 13459 | ACCTCAGGGTCCACCCGGCT |
| 13460 | CCTCAGGGTCCACCCGGCTC |
| 13461 | CTCAGGGTCCACCCGGCTCT |
| 13462 | TCAGGGTCCACCCGGCTCTC |
| 13463 | CAGGGTCCACCCGGCTCTCA |
| 13464 | AGGGTCCACCCGGCTCTCAG |
| 13465 | GGGTCCACCCGGCTCTCAGG |
| 13466 | GGTCCACCCGGCTCTCAGGG |
| 13467 | GTCCACCCGGCTCTCAGGGG |
| 13468 | TCCACCCGGCTCTCAGGGGC |
| 13469 | CCACCCGGCTCTCAGGGGCT |
| 13470 | CACCCGGCTCTCAGGGGCTA |
| 13471 | ACCCGGCTCTCAGGGGCTAA |
| 13472 | CCCGGCTCTCAGGGGCTAAC |
| 13473 | CCGGCTCTCAGGGGCTAACG |
| 13474 | CGGCTCTCAGGGGCTAACGG |
| 13475 | GGCTCTCAGGGGCTAACGGG |
| 13476 | GCTCTCAGGGGCTAACGGGA |
| 13477 | CTCTCAGGGGCTAACGGGAG |
| 13478 | TCTCAGGGGCTAACGGGAGG |
| 13479 | CTCAGGGGCTAACGGGAGGT |
| 13480 | TCAGGGGCTAACGGGAGGTC |
| 13481 | CAGGGGCTAACGGGAGGTCG |
| 13482 | AGGGGCTAACGGGAGGTCGG |
| 13483 | GGGGCTAACGGGAGGTCGGT |
| 13484 | GGGCTAACGGGAGGTCGGTG |
| 13485 | GGCTAACGGGAGGTCGGTGG |
| 13486 | GCTAACGGGAGGTCGGTGGA |
| 13487 | CTAACGGGAGGTCGGTGGAC |
| 13488 | TAACGGGAGGTCGGTGGACC |
| 13489 | AACGGGAGGTCGGTGGACCC |
| 13490 | ACGGGAGGTCGGTGGACCCC |
| 13491 | CGGGAGGTCGGTGGACCCCT |
| 13492 | GGGAGGTCGGTGGACCCCTC |
| 13493 | GGAGGTCGGTGGACCCCTCG |
| 13494 | GAGGTCGGTGGACCCCTCGG |
| 13495 | AGGTCGGTGGACCCCTCGGT |
| 13496 | GGTCGGTGGACCCCTCGGTT |
| 13497 | GTCGGTGGACCCCTCGGTTC |
| 13498 | TCGGTGGACCCCTCGGTTCC |
| 13499 | CGGTGGACCCCTCGGTTCCC |
| 13500 | GGTGGACCCCTCGGTTCCCT |
| 13501 | GTGGACCCCTCGGTTCCCTG |
| 13502 | TGGACCCCTCGGTTCCCTGA |
| 13503 | GGACCCCTCGGTTCCCTGAC |
| 13504 | GACCCCTCGGTTCCCTGACA |
| 13505 | ACCCCTCGGTTCCCTGACAG |
| 13506 | CCCCTCGGTTCCCTGACAGG |
| 13507 | CCCTCGGTTCCCTGACAGGC |
| 13508 | CCTCGGTTCCCTGACAGGCG |
| 13509 | CTCGGTTCCCTGACAGGCGG |
| 13510 | TCGGTTCCCTGACAGGCGGA |
| 13511 | CGGTTCCCTGACAGGCGGAC |
| 13512 | GGTTCCCTGACAGGCGGACC |
| 13513 | GTTCCCTGACAGGCGGACCC |
| 13514 | TTCCCTGACAGGCGGACCCG |
| 13515 | TCCCTGACAGGCGGACCCGC |
| 13516 | CCCTGACAGGCGGACCCGCA |
| 13517 | CCTGACAGGCGGACCCGCAC |
| 13518 | CTGACAGGCGGACCCGCACG |
| 13519 | TGACAGGCGGACCCGCACGC |
| 13520 | GACAGGCGGACCCGCACGCG |
| 13521 | ACAGGCGGACCCGCACGCGC |
| 13522 | CAGGCGGACCCGCACGCGCT |
| 13523 | AGGCGGACCCGCACGCGCTC |
| 13524 | GGCGGACCCGCACGCGCTCA |
| 13525 | GCGGACCCGCACGCGCTCAG |
| 13526 | CGGACCCGCACGCGCTCAGG |
| 13527 | GGACCCGCACGCGCTCAGGC |
| 13528 | GACCCGCACGCGCTCAGGCG |
| 13529 | ACCCGCACGCGCTCAGGCGC |
| 13530 | CCCGCACGCGCTCAGGCGCC |
| 13531 | CCGCACGCGCTCAGGCGCCG |
| 13532 | CGCACGCGCTCAGGCGCCGC |
| 13533 | GCACGCGCTCAGGCGCCGCT |
| 13534 | CACGCGCTCAGGCGCCGCTC |
| 13535 | ACGCGCTCAGGCGCCGCTCC |
| 13536 | CGCGCTCAGGCGCCGCTCCA |
| 13537 | GCGCTCAGGCGCCGCTCCAG |
| 13538 | CGCTCAGGCGCCGCTCCAGC |
| 13539 | GCTCAGGCGCCGCTCCAGCG |
| 13540 | CTCAGGCGCCGCTCCAGCGC |
| 13541 | TCAGGCGCCGCTCCAGCGCG |
| 13542 | CAGGCGCCGCTCCAGCGCGC |
| 13543 | AGGCGCCGCTCCAGCGCGCT |
| 13544 | GGCGCCGCTCCAGCGCGCTC |
| 13545 | GCGCCGCTCCAGCGCGCTCA |
| 13546 | CGCCGCTCCAGCGCGCTCAG |
| 13547 | GCCGCTCCAGCGCGCTCAGC |
| 13548 | CCGCTCCAGCGCGCTCAGCT |
| 13549 | CGCTCCAGCGCGCTCAGCTG |
| 13550 | GCTCCAGCGCGCTCAGCTGA |
| 13551 | CTCCAGCGCGCTCAGCTGAC |
| 13552 | TCCAGCGCGCTCAGCTGACT |
| 13553 | CCAGCGCGCTCAGCTGACTG |
| 13554 | CAGCGCGCTCAGCTGACTGC |
| 13555 | AGCGCGCTCAGCTGACTGCG |
| 13556 | GCGCGCTCAGCTGACTGCGG |
| 13557 | CGCGCTCAGCTGACTGCGGG |
| 13558 | GCGCTCAGCTGACTGCGGGT |
| 13559 | CGCTCAGCTGACTGCGGGTG |
| 13560 | GCTCAGCTGACTGCGGGTGC |
| 13561 | CTCAGCTGACTGCGGGTGCG |
| 13562 | TCAGCTGACTGCGGGTGCGC |
| 13563 | CAGCTGACTGCGGGTGCGCT |
| 13564 | AGCTGACTGCGGGTGCGCTC |
| 13565 | GCTGACTGCGGGTGCGCTCC |
| 13566 | CTGACTGCGGGTGCGCTCCG |
| 13567 | TGACTGCGGGTGCGCTCCGC |
| 13568 | GACTGCGGGTGCGCTCCGCG |
| 13569 | ACTGCGGGTGCGCTCCGCGT |
| 13570 | CTGCGGGTGCGCTCCGCGTG |
| 13571 | TGCGGGTGCGCTCCGCGTGT |
| 13572 | GCGGGTGCGCTCCGCGTGTT |
| 13573 | CGGGTGCGCTCCGCGTGTTC |
| 13574 | GGGTGCGCTCCGCGTGTTCG |
| 13575 | GGTGCGCTCCGCGTGTTCGC |
| 13576 | GTGCGCTCCGCGTGTTCGCG |
| 13577 | TGCGCTCCGCGTGTTCGCGC |
| 13578 | GCGCTCCGCGTGTTCGCGCA |
| 13579 | CGCTCCGCGTGTTCGCGCAG |
| 13580 | GCTCCGCGTGTTCGCGCAGC |
| 13581 | CTCCGCGTGTTCGCGCAGCC |
| 13582 | TCCGCGTGTTCGCGCAGCCC |
| 13583 | CCGCGTGTTCGCGCAGCCCC |
| 13584 | CGCGTGTTCGCGCAGCCCCT |
| 13585 | GCGTGTTCGCGCAGCCCCTG |
| 13586 | CGTGTTCGCGCAGCCCCTGG |
| 13587 | GTGTTCGCGCAGCCCCTGGC |
| 13588 | TGTTCGCGCAGCCCCTGGCC |
| 13589 | GTTCGCGCAGCCCCTGGCCG |
| 13590 | TTCGCGCAGCCCCTGGCCGA |
| 13591 | TCGCGCAGCCCCTGGCCGAG |
| 13592 | CGCGCAGCCCCTGGCCGAGC |
| 13593 | GCGCAGCCCCTGGCCGAGCT |
| 13594 | CGCAGCCCCTGGCCGAGCTG |
| 13595 | GCAGCCCCTGGCCGAGCTGC |
| 13596 | CAGCCCCTGGCCGAGCTGCA |
| 13597 | AGCCCCTGGCCGAGCTGCAG |
| 13598 | GCCCCTGGCCGAGCTGCAGG |
| 13599 | CCCCTGGCCGAGCTGCAGGA |
| 13600 | CCCTGGCCGAGCTGCAGGAG |
| 13601 | CCTGGCCGAGCTGCAGGAGT |
| 13602 | CTGGCCGAGCTGCAGGAGTC |
| 13603 | TGGCCGAGCTGCAGGAGTCC |
| 13604 | GGCCGAGCTGCAGGAGTCCG |
| 13605 | GCCGAGCTGCAGGAGTCCGT |
| 13606 | CCGAGCTGCAGGAGTCCGTG |
| 13607 | CGAGCTGCAGGAGTCCGTGC |
| 13608 | GAGCTGCAGGAGTCCGTGCG |
| 13609 | AGCTGCAGGAGTCCGTGCGC |
| 13610 | GCTGCAGGAGTCCGTGCGCC |
| 13611 | CTGCAGGAGTCCGTGCGCCA |
| 13612 | TGCAGGAGTCCGTGCGCCAG |
| 13613 | GCAGGAGTCCGTGCGCCAGG |
| 13614 | CAGGAGTCCGTGCGCCAGGA |
| 13615 | AGGAGTCCGTGCGCCAGGAC |
| 13616 | GGAGTCCGTGCGCCAGGACA |
| 13617 | GAGTCCGTGCGCCAGGACAT |
| 13618 | AGTCCGTGCGCCAGGACATT |
| 13619 | GTCCGTGCGCCAGGACATTC |
| 13620 | TCCGTGCGCCAGGACATTCA |
| 13621 | CCGTGCGCCAGGACATTCAT |
| 13622 | CGTGCGCCAGGACATTCATC |
| 13623 | GTGCGCCAGGACATTCATCT |
| 13624 | TGCGCCAGGACATTCATCTC |
| 13625 | GCGCCAGGACATTCATCTCG |
| 13626 | CGCCAGGACATTCATCTCGT |
| 13627 | GCCAGGACATTCATCTCGTC |
| 13628 | CCAGGACATTCATCTCGTCC |
| 13629 | CAGGACATTCATCTCGTCCC |
| 13630 | AGGACATTCATCTCGTCCCA |
| 13631 | GGACATTCATCTCGTCCCAG |
| 13632 | GACATTCATCTCGTCCCAGG |
| 13633 | ACATTCATCTCGTCCCAGGA |
| 13634 | CATTCATCTCGTCCCAGGAC |
| 13635 | ATTCATCTCGTCCCAGGACG |
| 13636 | TTCATCTCGTCCCAGGACGC |
| 13637 | TCATCTCGTCCCAGGACGCA |
| 13638 | CATCTCGTCCCAGGACGCAA |
| 13639 | ATCTCGTCCCAGGACGCAAA |
| 13640 | TCTCGTCCCAGGACGCAAAG |
| 13641 | CTCGTCCCAGGACGCAAAGC |
| 13642 | TCGTCCCAGGACGCAAAGCG |
| 13643 | CGTCCCAGGACGCAAAGCGC |
| 13644 | GTCCCAGGACGCAAAGCGCG |
| 13645 | TCCCAGGACGCAAAGCGCGG |
| 13646 | CCCAGGACGCAAAGCGCGGC |
| 13647 | CCAGGACGCAAAGCGCGGCG |
| 13648 | CAGGACGCAAAGCGCGGCGA |
| 13649 | AGGACGCAAAGCGCGGCGAC |
| 13650 | GGACGCAAAGCGCGGCGACT |
| 13651 | GACGCAAAGCGCGGCGACTT |
| 13652 | ACGCAAAGCGCGGCGACTTG |
| 13653 | CGCAAAGCGCGGCGACTTGG |
| 13654 | GCAAAGCGCGGCGACTTGGA |
| 13655 | CAAAGCGCGGCGACTTGGAC |
| 13656 | AAAGCGCGGCGACTTGGACT |
| 13657 | AAGCGCGGCGACTTGGACTG |
| 13658 | AGCGCGGCGACTTGGACTGC |
| 13659 | GCGCGGCGACTTGGACTGCA |
| 13660 | CGCGGCGACTTGGACTGCAC |
| 13661 | GCGGCGACTTGGACTGCACG |
| 13662 | CGGCGACTTGGACTGCACGG |
| 13663 | GGCGACTTGGACTGCACGGG |
| 13664 | GCGACTTGGACTGCACGGGT |
| 13665 | CGACTTGGACTGCACGGGTC |
| 13666 | GACTTGGACTGCACGGGTCC |
| 13667 | ACTTGGACTGCACGGGTCCG |
| 13668 | CTTGGACTGCACGGGTCCGC |
| 13669 | TTGGACTGCACGGGTCCGCC |
| 13670 | TGGACTGCACGGGTCCGCCC |
| 13671 | GGACTGCACGGGTCCGCCCT |
| 13672 | GACTGCACGGGTCCGCCCTG |
| 13673 | ACTGCACGGGTCCGCCCTGA |
| 13674 | CTGCACGGGTCCGCCCTGAG |
| 13675 | TGCACGGGTCCGCCCTGAGC |
| 13676 | GCACGGGTCCGCCCTGAGCG |
| 13677 | CACGGGTCCGCCCTGAGCGC |
| 13678 | ACGGGTCCGCCCTGAGCGCT |
| 13679 | CGGGTCCGCCCTGAGCGCTC |
| 13680 | GGGTCCGCCCTGAGCGCTCA |
| 13681 | GGTCCGCCCTGAGCGCTCAG |
| 13682 | GTCCGCCCTGAGCGCTCAGT |
| 13683 | TCCGCCCTGAGCGCTCAGTA |
| 13684 | CCGCCCTGAGCGCTCAGTAG |
| 13685 | CGCCCTGAGCGCTCAGTAGC |
| 13686 | GCCCTGAGCGCTCAGTAGCA |
| 13687 | CCCTGAGCGCTCAGTAGCAC |
| 13688 | CCTGAGCGCTCAGTAGCACG |
| 13689 | CTGAGCGCTCAGTAGCACGG |
| 13690 | TGAGCGCTCAGTAGCACGGC |
| 13691 | GAGCGCTCAGTAGCACGGCG |
| 13692 | AGCGCTCAGTAGCACGGCGG |
| 13693 | GCGCTCAGTAGCACGGCGGT |
| 13694 | CGCTCAGTAGCACGGCGGTG |
| 13695 | GCTCAGTAGCACGGCGGTGG |
| 13696 | CTCAGTAGCACGGCGGTGGC |
| 13697 | TCAGTAGCACGGCGGTGGCG |
| 13698 | CAGTAGCACGGCGGTGGCGG |
| 13699 | AGTAGCACGGCGGTGGCGGC |
| 13700 | GTAGCACGGCGGTGGCGGCG |
| 13701 | TAGCACGGCGGTGGCGGCGC |
| 13702 | AGCACGGCGGTGGCGGCGCA |
| 13703 | GCACGGCGGTGGCGGCGCAG |
| 13704 | CACGGCGGTGGCGGCGCAGA |
| 13705 | ACGGCGGTGGCGGCGCAGAG |
| 13706 | CGGCGGTGGCGGCGCAGAGC |
| 13707 | GGCGGTGGCGGCGCAGAGCA |
| 13708 | GCGGTGGCGGCGCAGAGCAT |
| 13709 | CGGTGGCGGCGCAGAGCATC |
| 13710 | GGTGGCGGCGCAGAGCATCA |
| 13711 | GTGGCGGCGCAGAGCATCAG |
| 13712 | TGGCGGCGCAGAGCATCAGG |
| 13713 | GGCGGCGCAGAGCATCAGGG |
| 13714 | GCGGCGCAGAGCATCAGGGC |
| 13715 | CGGCGCAGAGCATCAGGGCT |
| 13716 | GGCGCAGAGCATCAGGGCTG |
| 13717 | GCGCAGAGCATCAGGGCTGC |
| 13718 | CGCAGAGCATCAGGGCTGCC |
| 13719 | GCAGAGCATCAGGGCTGCCC |
| 13720 | CAGAGCATCAGGGCTGCCCC |
| 13721 | AGAGCATCAGGGCTGCCCCG |
| 13722 | GAGCATCAGGGCTGCCCCGG |
| 13723 | AGCATCAGGGCTGCCCCGGC |
| 13724 | GCATCAGGGCTGCCCCGGCC |
| 13725 | CATCAGGGCTGCCCCGGCCG |
| 13726 | ATCAGGGCTGCCCCGGCCGT |
| 13727 | TCAGGGCTGCCCCGGCCGTC |
| 13728 | CAGGGCTGCCCCGGCCGTCG |
| 13729 | AGGGCTGCCCCGGCCGTCGG |
| 13730 | GGGCTGCCCCGGCCGTCGGA |
| 13731 | GGCTGCCCCGGCCGTCGGAG |
| 13732 | GCTGCCCCGGCCGTCGGAGC |
| 13733 | CTGCCCCGGCCGTCGGAGCA |
| 13734 | TGCCCCGGCCGTCGGAGCAC |
| 13735 | GCCCCGGCCGTCGGAGCACC |
| 13736 | CCCCGGCCGTCGGAGCACCG |
| 13737 | CCCGGCCGTCGGAGCACCGC |
| 13738 | CCGGCCGTCGGAGCACCGCT |
| 13739 | CGGCCGTCGGAGCACCGCTC |
| 13740 | GGCCGTCGGAGCACCGCTCA |
| 13741 | GCCGTCGGAGCACCGCTCAT |
| 13742 | CCGTCGGAGCACCGCTCATC |
| 13743 | CGTCGGAGCACCGCTCATCC |
| 13744 | GTCGGAGCACCGCTCATCCT |
| 13745 | TCGGAGCACCGCTCATCCTC |
| 13746 | CGGAGCACCGCTCATCCTCT |
| 13747 | GGAGCACCGCTCATCCTCTT |
| 13748 | GAGCACCGCTCATCCTCTTA |
| 13749 | AGCACCGCTCATCCTCTTAG |
| 13750 | GCACCGCTCATCCTCTTAGG |
| 13751 | CACCGCTCATCCTCTTAGGT |
| 13752 | ACCGCTCATCCTCTTAGGTA |
| 13753 | CCGCTCATCCTCTTAGGTAG |
| 13754 | CGCTCATCCTCTTAGGTAGC |
| 13755 | GCTCATCCTCTTAGGTAGCC |
| 13756 | CTCATCCTCTTAGGTAGCCT |
| 13757 | TCATCCTCTTAGGTAGCCTG |
| 13758 | CATCCTCTTAGGTAGCCTGG |
| 13759 | ATCCTCTTAGGTAGCCTGGG |
| 13760 | TCCTCTTAGGTAGCCTGGGA |
| 13761 | CCTCTTAGGTAGCCTGGGAG |
| 13762 | CTCTTAGGTAGCCTGGGAGC |
| 13763 | TCTTAGGTAGCCTGGGAGCG |
| 13764 | CTTAGGTAGCCTGGGAGCGG |
| 13765 | TTAGGTAGCCTGGGAGCGGG |
| 13766 | TAGGTAGCCTGGGAGCGGGG |
| 13767 | AGGTAGCCTGGGAGCGGGGA |
| 13768 | GGTAGCCTGGGAGCGGGGAT |
| 13769 | GTAGCCTGGGAGCGGGGATT |
| 13770 | TAGCCTGGGAGCGGGGATTC |
| 13771 | AGCCTGGGAGCGGGGATTCG |
| 13772 | GCCTGGGAGCGGGGATTCGG |
| 13773 | CCTGGGAGCGGGGATTCGGG |
| 13774 | CTGGGAGCGGGGATTCGGGG |
| 13775 | TGGGAGCGGGGATTCGGGGA |
| 13776 | GGGAGCGGGGATTCGGGGAC |
| 13777 | GGAGCGGGGATTCGGGGACT |
| 13778 | GAGCGGGGATTCGGGGACTC |
| 13779 | AGCGGGGATTCGGGGACTCT |
| 13780 | GCGGGGATTCGGGGACTCTC |
| 13781 | CGGGGATTCGGGGACTCTCG |
| 13782 | GGGGATTCGGGGACTCTCGG |
| 13783 | GGGATTCGGGGACTCTCGGG |
| 13784 | GGATTCGGGGACTCTCGGGG |
| 13785 | GATTCGGGGACTCTCGGGGA |
| 13786 | ATTCGGGGACTCTCGGGGAC |
| 13787 | TTCGGGGACTCTCGGGGACG |
| 13788 | TCGGGGACTCTCGGGGACGT |
| 13789 | CGGGGACTCTCGGGGACGTT |
| 13790 | GGGGACTCTCGGGGACGTTG |
| 13791 | GGGACTCTCGGGGACGTTGG |
| 13792 | GGACTCTCGGGGACGTTGGG |
| 13793 | GACTCTCGGGGACGTTGGGG |
| 13794 | ACTCTCGGGGACGTTGGGGT |
| 13795 | CTCTCGGGGACGTTGGGGTT |
| 13796 | TCTCGGGGACGTTGGGGTTC |
| 13797 | CTCGGGGACGTTGGGGTTCC |
| 13798 | TCGGGGACGTTGGGGTTCCA |
| 13799 | CGGGGACGTTGGGGTTCCAG |
| 13800 | GGGGACGTTGGGGTTCCAGG |
| 13801 | GGGACGTTGGGGTTCCAGGT |
| 13802 | GGACGTTGGGGTTCCAGGTG |
| 13803 | GACGTTGGGGTTCCAGGTGC |
| 13804 | ACGTTGGGGTTCCAGGTGCG |
| 13805 | CGTTGGGGTTCCAGGTGCGA |
| 13806 | GTTGGGGTTCCAGGTGCGAG |
| 13807 | TTGGGGTTCCAGGTGCGAGG |
| 13808 | TGGGGTTCCAGGTGCGAGGA |
| 13809 | GGGGTTCCAGGTGCGAGGAC |
| 13810 | GGGTTCCAGGTGCGAGGACT |
| 13811 | GGTTCCAGGTGCGAGGACTG |
| 13812 | GTTCCAGGTGCGAGGACTGG |
| 13813 | TTCCAGGTGCGAGGACTGGA |
| 13814 | TCCAGGTGCGAGGACTGGAG |
| 13815 | CCAGGTGCGAGGACTGGAGA |
| 13816 | CAGGTGCGAGGACTGGAGAC |
| 13817 | AGGTGCGAGGACTGGAGACG |
| 13818 | GGTGCGAGGACTGGAGACGC |
| 13819 | GTGCGAGGACTGGAGACGCG |
| 13820 | TGCGAGGACTGGAGACGCGG |
| 13821 | GCGAGGACTGGAGACGCGGA |
| 13822 | CGAGGACTGGAGACGCGGAG |
| 13823 | GAGGACTGGAGACGCGGAGG |
| 13824 | AGGACTGGAGACGCGGAGGA |
| 13825 | GGACTGGAGACGCGGAGGAC |
| 13826 | GACTGGAGACGCGGAGGACC |
| 13827 | ACTGGAGACGCGGAGGACCG |
| 13828 | CTGGAGACGCGGAGGACCGG |
| 13829 | TGGAGACGCGGAGGACCGGG |
| 13830 | GGAGACGCGGAGGACCGGGG |
| 13831 | GAGACGCGGAGGACCGGGGG |
| 13832 | AGACGCGGAGGACCGGGGGT |
| 13833 | GACGCGGAGGACCGGGGGTA |
| 13834 | ACGCGGAGGACCGGGGGTAA |
| 13835 | CGCGGAGGACCGGGGGTAAG |
| 13836 | GCGGAGGACCGGGGGTAAGA |
| 13837 | CGGAGGACCGGGGGTAAGAC |
| 13838 | GGAGGACCGGGGGTAAGACC |
| 13839 | GAGGACCGGGGGTAAGACCC |
| 13840 | AGGACCGGGGGTAAGACCCG |
| 13841 | GGACCGGGGGTAAGACCCGC |
| 13842 | GACCGGGGGTAAGACCCGCT |
| 13843 | ACCGGGGGTAAGACCCGCTT |
| 13844 | CCGGGGGTAAGACCCGCTTG |
| 13845 | CGGGGGTAAGACCCGCTTGG |
| 13846 | GGGGGTAAGACCCGCTTGGT |
| 13847 | GGGGTAAGACCCGCTTGGTT |
| 13848 | GGGTAAGACCCGCTTGGTTG |
| 13849 | GGTAAGACCCGCTTGGTTGC |
| 13850 | GTAAGACCCGCTTGGTTGCA |
| 13851 | TAAGACCCGCTTGGTTGCAG |
| 13852 | AAGACCCGCTTGGTTGCAGA |
| 13853 | AGACCCGCTTGGTTGCAGAA |
| 13854 | GACCCGCTTGGTTGCAGAAG |
| 13855 | ACCCGCTTGGTTGCAGAAGC |
| 13856 | CCCGCTTGGTTGCAGAAGCC |
| 13857 | CCGCTTGGTTGCAGAAGCCG |
| 13858 | CGCTTGGTTGCAGAAGCCGC |
| 13859 | GCTTGGTTGCAGAAGCCGCT |
| 13860 | CTTGGTTGCAGAAGCCGCTG |
| 13861 | TTGGTTGCAGAAGCCGCTGG |
| 13862 | TGGTTGCAGAAGCCGCTGGA |
| 13863 | GGTTGCAGAAGCCGCTGGAA |
| 13864 | GTTGCAGAAGCCGCTGGAAA |
| 13865 | TTGCAGAAGCCGCTGGAAAG |
| 13866 | TGCAGAAGCCGCTGGAAAGA |
| 13867 | GCAGAAGCCGCTGGAAAGAA |
| 13868 | CAGAAGCCGCTGGAAAGAAT |
| 13869 | AGAAGCCGCTGGAAAGAATC |
| 13870 | GAAGCCGCTGGAAAGAATCG |
| 13871 | AAGCCGCTGGAAAGAATCGG |
| 13872 | AGCCGCTGGAAAGAATCGGA |
| 13873 | GCCGCTGGAAAGAATCGGAT |
| 13874 | CCGCTGGAAAGAATCGGATC |
| 13875 | CGCTGGAAAGAATCGGATCA |
| 13876 | GCTGGAAAGAATCGGATCAC |
| 13877 | CTGGAAAGAATCGGATCACA |
| 13878 | TGGAAAGAATCGGATCACAG |
| 13879 | GGAAAGAATCGGATCACAGT |
| 13880 | GAAAGAATCGGATCACAGTC |
| 13881 | AAAGAATCGGATCACAGTCG |
| 13882 | AAGAATCGGATCACAGTCGT |
| 13883 | AGAATCGGATCACAGTCGTG |
| 13884 | GAATCGGATCACAGTCGTGT |
| 13885 | AATCGGATCACAGTCGTGTG |
| 13886 | ATCGGATCACAGTCGTGTGA |
| 13887 | TCGGATCACAGTCGTGTGAG |
| 13888 | CGGATCACAGTCGTGTGAGG |
| 13889 | GGATCACAGTCGTGTGAGGA |
| 13890 | GATCACAGTCGTGTGAGGAT |
| 13891 | ATCACAGTCGTGTGAGGATC |
| 13892 | TCACAGTCGTGTGAGGATCC |
| 13893 | CACAGTCGTGTGAGGATCCG |
| 13894 | ACAGTCGTGTGAGGATCCGC |
| 13895 | CAGTCGTGTGAGGATCCGCT |
| 13896 | AGTCGTGTGAGGATCCGCTC |
| 13897 | GTCGTGTGAGGATCCGCTCA |
| 13898 | TCGTGTGAGGATCCGCTCAG |
| 13899 | CGTGTGAGGATCCGCTCAGC |
| 13900 | GTGTGAGGATCCGCTCAGCT |
| 13901 | TGTGAGGATCCGCTCAGCTC |
| 13902 | GTGAGGATCCGCTCAGCTCG |
| 13903 | TGAGGATCCGCTCAGCTCGG |
| 13904 | GAGGATCCGCTCAGCTCGGC |
| 13905 | AGGATCCGCTCAGCTCGGCT |
| 13906 | GGATCCGCTCAGCTCGGCTT |
| 13907 | GATCCGCTCAGCTCGGCTTC |
| 13908 | ATCCGCTCAGCTCGGCTTCT |
| 13909 | TCCGCTCAGCTCGGCTTCTC |
| 13910 | CCGCTCAGCTCGGCTTCTCC |
| 13911 | CGCTCAGCTCGGCTTCTCCC |
| 13912 | GCTCAGCTCGGCTTCTCCCC |
| 13913 | CTCAGCTCGGCTTCTCCCCG |
| 13914 | TCAGCTCGGCTTCTCCCCGC |
| 13915 | CAGCTCGGCTTCTCCCCGCC |
| 13916 | AGCTCGGCTTCTCCCCGCCG |
| 13917 | GCTCGGCTTCTCCCCGCCGC |
| 13918 | CTCGGCTTCTCCCCGCCGCG |
| 13919 | TCGGCTTCTCCCCGCCGCGC |
| 13920 | CGGCTTCTCCCCGCCGCGCC |
| 13921 | GGCTTCTCCCCGCCGCGCCC |
| 13922 | GCTTCTCCCCGCCGCGCCCG |
| 13923 | CTTCTCCCCGCCGCGCCCGA |
| 13924 | TTCTCCCCGCCGCGCCCGAG |
| 13925 | TCTCCCCGCCGCGCCCGAGG |
| 13926 | CTCCCCGCCGCGCCCGAGGA |
| 13927 | TCCCCGCCGCGCCCGAGGAC |
| 13928 | CCCCGCCGCGCCCGAGGACG |
| 13929 | CCCGCCGCGCCCGAGGACGG |
| 13930 | CCGCCGCGCCCGAGGACGGT |
| 13931 | CGCCGCGCCCGAGGACGGTT |
| 13932 | GCCGCGCCCGAGGACGGTTT |
| 13933 | CCGCGCCCGAGGACGGTTTT |
| 13934 | CGCGCCCGAGGACGGTTTTT |
| 13935 | AGAAGCCGAGCTGAGCGGATCCTCACACGACTG |
| | TGATCCGATTCTTTCCAGCGGCTTCTGCAACCAA |
| | GCGGGTCTTACCCCCGGTCCTCCGCGTCTCCAGT |
| | CCTCGCACCTGGAACCCCAACGTCCCCGAGAGT |
| | CCCCGAATCCCCGCTCCCAGGCTACCTAAGAGG |
| | ATGAGCGGTGCTCCGACGGCCGGGGCAGCCCTG |
| | ATGCTCTGCGCCGCCACCGCCGTGCTACTGAGCG |
| | CTCAGGGCGGACCCGTGCAGTCCAAGTCGCCGC |
| | GCTTTGCGTCCTGGGACGAGATGAATGTCCTGGC |
| | GCACGGACTCCTGCAGCTCGGCCAGGGGCTGCG |
| | CGAACACGCGGAGCGCACCCGCAGTCAGCTGAG |
| | CGCGCTGGAGCGGCGCCTGAGCGCGTGCGGGTC |
| | CGCCTGTCAGGGAACCGAGGGGTCCACCGACCT |
| | CCCGTTAGCCCCTGAGAGCCGGGTGGACCCTGA |
| | GGTCCTTCACAGCCTGCAGACACAACTCAAGGC |
| | TCAGAACAGCAGGATCCAGCAACTCTTCCACAA |
| | GGTGGCCCAGCAGCAGCGGCACCTGGAGAAGCA |
| | GCACCTGCGAATTCAGCATCTGCAAAGCCAGTTT |
| | GGCCTCCTGGACCACAAGCACCTAGACCATGAG |
| | GTGGCCAAGCCTGCCCGAAGAAAGAGGCTGCCC |
| | GAGATGGCCCAGCCAGTTGACCCGGCTCACAAT |
| | GTCAGCCGCCTGCACCGGCTGCCCAGGGATTGC |
| | CAGGAGCTGTTCCAGGTTGGGGAGAGGCAGAGT |
| | CAACACAGTGAAACCCCGTCTCTACTAAAAATA |
| | CAAAAATTAGCTGGGTGTGGTGGTGGGCGCCTG |
| | TAATCCCAGCTACTGGGGAGGCTGAGGCAGGAG |
| | AACCTCTTGAACCCGGGAGGCGGAGGTTGCAGT |
| | GAGCCGGGATCATGCCATTGCACTCCAGCCTGG |
| | GCGACAGAGCTCGACTCCATCTCAAAATAATAA |
| | TAATAATAAATAAAATAAAATACAAATACAAAA |
| | ATTAGCCAGGTGTGGTGGCAGCTACTTGGGAGG |
| | CTGAGACACAAGAATCACTTGAGTCTGGGAGGC |
| | AGAGGTTGCAGTGAGCCAAGATTGCGCCACTGC |
| | ACTCCAACCTGGGTGACAGAGCGAGACTCTGTC |
| | TGAAAAAATAAAAAATAAGCCAGGCATAGAGCT |
| | GCATGACTGTAGTCCCAGCTACACAGGAGGCTG |
| | AAAACAGGAGGATCGCCTGACCCCAGGAGTTGG |
| | AGGCTGCAGTGAGCTGTGACAGCACCACTGCAC |
| | TCCAGCCTGGGCGAGAGAACGAGACCCCGTCAT |
| | TGGGAAAAAAAAGAAAAAAGAAAGACTCCCTTG |
| | CCTGGCCTCAGCGGATGGAGATTTGGAAGGATG |
| | GATGAGTGGATGAATTAAGAGGTTGGGGTAGGC |
| | AAGCTGGGTCCTCACCAAGGTTTTCACCCCTCCC |
| | CAGACACAACTCAAGGCTCAGAACAGCAGGATC |
| | CAGCAACTCTTCCACAAGGTGGCCCAGCAGCAG |
| | CGGCACCTGGAGAAGCAGCACCTGCGAATTCAG |
| | CATCTGCAAAGCCAGGTAACCCTAGGATCAAGG |
| | GAGAAAAGGTCCCTCTGATAGCTGGACCCCAGG |
| | TTGAGAGGGAGGTGGTGAGAACTGGACGTGTGG |
| | CTGGGGACGTGGGGCCAGGCAGGACCTGACACC |
| | CTCCTCCCGTCCCATCCTAGTTTGGCCTCCTGGA |
| | CCACAAGCACCTAGACCATGAGGTGGCCAAGCC |
| | TGCCCGAAGAAAGAGGCTGCCCGAGATGGCCCA |
| | GCCAGTTGACCCGGCTCACAATGTCAGCCGCCTG |
| | CACCGTGAGTGTCTGCCCCTCGATGCTCTCCGGT |
| | GGCCACCCCTACCCCGCCACTTGCCATTGCTGGT |
| | CCTCTCCTTGTCAGGTCCACCTTAAGGAGAAGAT |
| | GTCCTGGCCTGGAGTCCCTGAGGGCTCACCAGTC |
| | TCTGGGTCAAAGCTGATGGGAGCACCTCCTTCCT |
| | CAGCCCTGACCTGGCCCAGCCAGGCCACCCAAC |
| | CCTTCTCCTCTGCAAGCCAGTGGGCTGTCCCTGA |
| | AGCCCTGCTGATCACTGATTGGAACAGAGGTGG |
| | AGAAAGAGGTCTTGAGGGACTTGAGCTGCAGGG |
| | GTGCTGGAGAAGGTAGAAATGGGGTTCGGGGTG |
| | CCATCCTGAAGGTTAGAACCTTCTAGGGGAGGG |
| | TGTCATGGAGGAGGGGGTGCCAGGTAGTAGTGT |
| | TTGTAGATTTGGGCCCTCCACAATGTCTTGGGGT |
| | ATGTGGGAATTAGGGCTGGGAACCCCCAGCTCC |
| | CAGACCAGAAACACTCTTGTATCTTACAAATCCA |
| | ATGCTCCAGGTCCCTGACCCCTCTTCCTCCTTCCT |
| | CTCTTGTTCTCCTCCTCCCTCCCCGCCCCCGCCGG |
| | CCCCCTCCCCACCGCAGAAAGTGGGCTTTTGCTG |
| | CCACCACAAGTTGTAGGTGCTTTATTCCCAAATC |
| | TCCGTTCATCTCGAACCACAGCATGTCCACGTGT |
| | GTCCGATGCAGACTCGCGGTTCTCTAAGTTCACG |
| | GCCCCACACGGTTTCTCTGTGGTCCTCATCCTTC |
| | CCTGCATCTGTGGCTGTCCACAGCCAACTGGGTG |
| | AAAGTTTGGATCCCCCTCTCACACCCTAGGGTCA |
| | GTGGCAGGCTTCCAGCACTGTAGACCTGAGGGT |
| | TCTCTCCTCCCCAAGCTCCCGCTCCTTCCCACCTC |
| | CGTGCTGCCCGCCCCCAACCCCGCCAGGCTAGC |
| | ATCTCAGCGTGGTCAGGGTCCTGTCCACCCTCCC |
| | AAAGCCACCATCCCAGGATGAGGGGCTTCTGGA |
| | GGGTGACGGGGGAAGGCACAAGTCCTGGCTGGG |
| | AAATGCGGTGGAAGGGGGCAGGGGTTCTGTGGG |
| | TTCGGGACTCCCAGACTCTTGGCTCAGGCCCGCC |
| | AAGTAGGAGAAAGTTCAGAGCTGGGAAGGCGA |
| | ACAGCTGGCATTCATGGAAGCCACACTGGTGGT |
| | TTGGCCGCGTGCCCATCCTTACTGGATGGGAGGA |
| | AAGTAGGGGAAAGGGGAGATGCCTGAGGGGCC |
| | GGAAAGCGTCTTCCTGGTCACTCTGGGCCCGCCC |
| | CCACCCCCACCGTGCAGACTCATTTCGACCTTTC |
| | AAAAAGGCCAAGTGCAGTGGCTCACACCTGTAA |
| | TCCCAGCACTTTGGGAGGTTGAGGCAGACAGAT |
| | CACGAGGTCAGGAGTTCGAGACCAGCCTGACCA |
| | ACATGGTGAAACCCCGTCTCTACTAAAAATACA |
| | AAAATTAGCCGGGCATGGTGGTGTGCACCTGTA |
| | ATCCCAGCTACTCAGGTGGCTGAGGCAGGAGAA |
| | TCTCTTGAACCTGGGAGGCAGAGGTTGCAGTGA |
| | GCTGAGATGACGCCACCGCACTCCAGCCTGGGC |
| | GACAGAGCGAGACTCCGTCCCCCCATCAAAAAA |
| | ATAAAAAAGAGAAAATAAAATAAAATAAAATA |
| | AAATTCAGCCCTTGCTGGGCATGGTGGCACATGC |
| | CTGTAGTCCCAGCTACTCGGGAGGCCAAGGCAG |
| | GAGGGTCACTTCAGCCCAGGAGTTAAAGGCTGC |
| | CGTGAGCCGTGATCACACCTGTGAATAGCCACC |
| | GCACTCCAACCTGGGCAACACAACAAAACCTCG |
| | TTTCTAAAAAAAAACAAAGGCTGAGCACGGTGG |
| | CTTACACCTGAAATGCCAGCACTTTGGGAGGCTG |
| | AGGCGGGCAAATCACTTGAGGTCAGAAGTTCAA |
| | GACCAGCCTGGCCAACATGGTGAAACCCTATCT |
| | CTACCAACATAAACATTAGCCGGGCGTGCCTGT |
| | GATTCCAGCTGCTTGTGGGGCTGAAGCACAAGA |
| | ATCGCTTGAGCCCCGAAGGCAGAGGTTGCAGTG |
| | AGCTGAGATTGCGGCACTGCGATCCAGCCTGGG |
| | CAACAGAGTGAGACTCCATCTCTAAAAAAAAAA |
| | AAAAAAAAAAAGAAAGCTTTTTTTTCCACTGAG |
| | AAGTCCTTTCCATTACAAGAGGTTACAACACGG |
| | GGTTTTACCCAGTTCAGCTGGCCCAGAGAGGCTT |
| | TGCAGATTTCCACTGCCTACTCCCTCCCACACTC |
| | AGTCCCTGCTGGGTTCTTGGGACAAAGATCTTCC |
| | CAAGGCCAGCCCATAATATTCCTCCCTCTGACCC |
| | ACCCTCCTCGAGTCCTCCAGGGATGAGTGAGGG |
| | AGCTGCTGTCTTCCTGGGTTTGGAGGGGGTTTGG |
| | TGCTTGGCAGCCAGATGAGGGAGTGGGGTCGTC |
| | TGTGAAGAGGGACTTCCTGGTGACCTTGTACCTT |
| | TCTGGGCAGATGGAGGCTGGACAGTAATTCAGA |
| | GGCGCCACGATGGCTCAGTGGACTTCAACCGGC |
| | CCTGGGAAGCCTACAAGGCGGGGTTTGGGGATC |
| | CCCACGGTAGGTGTTTCTAGTGGGGACAGAGGC |
| | AGGGGAGGAAGAGGGACCCTCAGAAGTGGCCCT |
| | GCCTCATGGAGTGGCCTCTCCCACTCCAGGCGAG |
| | TTCTGGCTGGGTCTGGAGAAGGTGCATAGCATC |
| | ACGGGGGACCGCAACAGCCGCCTGGCCGTGCAG |
| | CTGCGGGACTGGGATGGCAACGCCGAGTTGCTG |
| | CAGTTCTCCGTGCACCTGGGTGGCGAGGACACG |
| | GCCTATAGCCTGCAGCTCACTGCACCCGTGGCCG |
| | GCCAGCTGGGCGCCACCACCGTCCCACCCAGCG |
| | GCCTCTCCGTACCCTTCTCCACTTGGGACCAGGA |
| | TCACGACCTCCGCAGGGACAAGAACTGCGCCAA |
| | GAGCCTCTCTGGTGAGCAGGCCCTGCCATGCCAC |
| | ACCCAGCCAGCAGCTTCCCTCCTTATCTTTCTGC |
| | TGCTCTGTCCTGCCTTCAACCCCACATTGCATCT |
| | GTTTCCTGCCCCCACCTCTTCCTTACATGCCGTGT |
| | GTGTGATTGGGCCACTAACTTAGCCTATCTGGCC |
| | TCAGTTTTCCCATCCTGAAAAGGGTCTTGACCGT |
| | CTTTACTTTTATTTACTTATGTGTTTGTTTATTTAT |
| | TTATTTATGTATTTATTTTTTGAGACGGAGTCTCA |
| | CTTTGTCACCCAGGCTGGAGTGCTTTGTGGCACG |
| | ATCTTGGCTCACTGCAAGCTCCACCTCCTGAGTT |
| | CACACCATTCTCCTGCCTCAGCCTCCCGAGTAGC |
| | TGGGACTATAGGTGCCCACCACCACGCCTGGCT |
| | AATTTTTTTGTATTTTTAGTAGAGATGGGGTTTC |
| | ACCGTGTTAGCCAGGATGGTCTCGATCTCCTGAC |
| | CTCGTGATCTGCCTGCCTCAGCCTCCCAAAGTGC |
| | TGGGATTACAGGCGTGAGCCACCGCGCCCGGCC |
| | TACTTATTTATTTTTTGAGACAGAGTCCCGCTGT |
| | GTCTCCCAGGCTGGAGTGCAAGTGACGTGATCTT |
| | GGCTCACTGCAGCCTCCGCCTCCTGGGTTCAAGT |
| | GATTCTCCTGCCTCAGCCTCCTGAGTAGCTGGGA |
| | TTACAGGTTCCCGCCACCATGCACAGATAATTGT |
| | GGACTATTTGAAATCCAGCCTCAGGGGTCTCCGC |
| | CATTTTTGGTGAACTGCAAGATGACCTCAGATGG |
| | AGGCTGGACAGTAATTCAGAGGCGCCACGATGG |
| | CTCAGTGGACTTCAACCGGCCCTGGGAAGCCTA |
| | CAAGGCGGGGTTTGGGGATCCCCACGGCGAGTT |
| | CTGGCTGGGTCTGGAGAAGGTGCATAGCATCAC |
| | GGGGGACCGCAACAGCCGCCTGGCCGTGCAGCT |
| | GCGGGACTGGGATGGCAACGCCGAGTTGCTGCA |
| | GTTCTCCGTGCACCTGGGTGGCGAGGACACGGC |
| | CTATAGCCTGCAGCTCACTGCACCCGTGGCCGGC |
| | CAGCTGGGCGCCACCACCGTCCCACCCAGCGGC |
| | CTCTCCGTACCCTTCTCCACTTGGGACCAGGATC |
| | ACGACCTCCGCAGGGACAAGAACTGCGCCAAGA |
| | GCCTCTCTGGAGGCTGGTGGTTTGGCACCTGCAG |
| | CCATTCCAACCTCAACGGCCAGTACTTCCGCTCC |
| | ATCCCACAGCAGCGGCAGAAGCTTAAGAAGGGA |
| | ATCTTCTGGAAGACCTGGCGGGGCCGCTACTACC |
| | CGCTGCAGGCCACCACCATGTTGATCCAGCCCAT |
| | GGCAGCAGAGGCAGCCTCCTAGCGTCCTGGCTG |
| | GGCCTGGTCCCAGGCCCACGAAAGACGGTGACT |
| | CTTGGCTCTGCCCGAGGATGTGGCCGTTCCCTGC |
| | CTGGGCAGGGGCTCCAAGGAGGGGCCATCTGGA |
| | AACTTGTGGACAGAGAAGAAGACCACGACTGGA |
| | GAAGCCCCCTTTCTGAGTGCAGGGGGGCTGCAT |
| | GCGTTGCCTCCTGAGATCGAGGCTGCAGGATAT |
| | GCTCAGACTCTAGAGGCGTGGACCAAGGGGCAT |
| | GGAGCTTCACTCCTTGCTGGCCAGGGAGTTGGG |
| | GACTCAGAGGGACCACTTGGGGCCAGCCAGACT |
| | GGCCTCAATGGCGGACTCAGTCACATTGACTGA |
| | CGGGGACCAGGGCTTGTGTGGGTCGAGAGCGCC |
| | CTCATGGTGCTGGTGCTGTTGTGTGTAGGTCCCC |
| | TGGGGACACAAGCAGGCGCCAATGGTATCTGGG |
| | CGGAGCTCACAGAGTTCTTGGAATAAAAGCAAC |
| | CTCAGAACA |
| 13936 | AAAAACCGTCCTCGGGCGCGGGGGGGAGAAGCC |
| | GAGCTGAGCGGATCCTCACACGACTGTGATCCG |
| | ATTCTTTCCAGCGGCTTCTGCAACCAAGCGGGTC |
| | TTACCCCCGGTCCTCCGCGTCTCCAGTCCTCGCA |
| | CCTGGAACCCCAACGTCCCCGAGAGTCCCCGAA |
| | TCCCCGCTCCCAGGCTACCTAAGAGGATGAGCG |
| | GTGCTCCGACGGCCGGGGCAGCCCTGATGCTCT |
| | GCGCCGCCACCGCCGTGCTACTGAGCGCTCAGG |
| | GCGGACCCGTGCAGTCCAAGTCGCCGCGCTTTGC |
| | GTCCTGGGACGAGATGAATGTCCTGGCGCACGG |
| | ACTCCTGCAGCTCGGCCAGGGGCTGCGCGAACA |
| | CGCGGAGCGCACCCGCAGTCAGCTGAGCGCGCT |
| | GGAGCGGCGCCTGAGCGCGTGCGGGTCCGCCTG |
| | TCAGGGAACCGAGGGGTCCACCGACCTCCCGTT |
| | AGCCCCTGAGAGCCGGGTGGACCCTGAGGTCCT |
| | TCACAGCCTGCAGGTACGTGTCCCCAGGGCTGGT |
| | TCTCCGCGCCCCTAGTGGCTCTCCTGGCTTGGAA |
| | GGGTATGGACAGGAGTGGGGCGTGGGGGCGGG |
| | GTGCGCAACTGTGGCTCCCTGGGCTTCCCTGCGT |
| | CAAGGGATGGGCTCCCCCCTTAGGAAGCCGAGG |
| | AGGGAGGTTCGCTCAAGGCCAGGAATTCAAGAC |
| | CACCTAAAGCAAAATAGCGAGACCCCCGTCTCT |
| | TCTACACACACACACACACACACACAAAATAAA |
| | TAAAATAAAATAAAATAAATATAAAATTAAAAA |
| | ACGACCGGGCGCAGTGGCTCACGGAGCCTCCAC |
| | CTGCTGTCGAGACTAGCCTGGCCAACATGGAGA |
| | AACCTCGTCTCTACTAAAAATACAAAAAATTAG |
| | CCTGGCATGGTGTGCATGCCTGTAATCCCAGCTA |
| | CTTGGGAGGCTGAGGCAGGAGAATCTCTTGAAC |
| | CCGGGAGGCAGAGGTTGCAGTGAGCCGAGATCG |
| | CAGCACTGCACTCCAGCCTGGGCAACAGAGTGA |
| | GACTCCTCAAAAAAATAATAGCGATAAAATAAA |
| | AATAAAGCCAGGTGCGGTGACTCACGCTTGTAG |
| | TCCCAGCACTTTGGGAGGGCGAGGCCAGTGGAT |
| | CACCTGAGGTCAGGAGTTCAAGACCAGCCTGAC |
| | CCCTACTTTTCCGGCTGGGCTGGGGGCGGTTCCT |
| | CCCAGTCTGGAGCGTCTGAGCCTCCAGACGTGCT |
| | CAACGCCATCCTCCCCTCCTCCCTCCCTCTTTCTT |
| | TCCTCAACCCTGCCTCCTCTCCCTCTAGGAGCTG |
| | GGACCCCAGGCAGAGCCTCTGAGATGCTCCTGC |
| | TCAGCACAGTTCTTCCCGTTCTGGACCTGCTGCC |
| | TCATTCATTCATTCATTCATTCATTTGTCAAGACT |
| | GTTTTGTTTGCTTTTTGAGACGGAGTCTCGCTCTG |
| | TTGTCCAGGCTGGAGTGCAGTGGCGCAATCTCA |
| | GCTCACTGCAACCTCTGCCTCCCACTGGGTTCAA |
| | GTGATTCTCCTGCCTCAGCCTCTCAAGTAGATGG |
| | GATTATAGGCGCCTACCGCCACCACGCCCAGCT |
| | AATTTTTATTCATTTATCAAGTCTTTTTTTTTTTTG |
| | AGACAGAGTCTCACTCTGTCACCCAGGTTGGAGT |
| | GCAATGGTTCAACCTCAGCTGACTGCAACCTCTG |
| | CCTCCCGGGTTCAAGTGATTCTCCTGCCTCTGCC |
| | TCCTAAGGAGCTGGGATTACTGGCGTCCACCATC |
| | ACACCCAGCTAATCTTTGTATGTTTTACTAGAGA |
| | TGGGGTTTGGCCATGTTGACCAGGCTGGTCTCAA |
| | ACTCCTGACCGATCCGCCCGCCTCCCAAAGTGCT |
| | GGATTACAGGCATGAACCACTGCGCCCGGCCCA |
| | TTCCTCAAGTCTTTATTGAGCAGCTGCTATGCGC |
| | TGGGGCCTGCGTGGATGCTGGTGCCAGGCTGTG |
| | GGCAGAGCTGCTCCTTGTCCCCAGCCTCATGGAG |
| | CCTCCATTGAGTCAGAGGAGAGACCATTAGATG |
| | ACCTCAGTGTCCAGGAGTGGGAAGTCCTTGCTCA |
| | ATTCCCATTTGGGGTGTTCTGGCCTGGTCTGGGG |
| | GTGAGGCAAGGCAGGGTGTCCTTCCAGAAGCTG |
| | GGACCCAGAGAGAGAAGTGAGGAAAGAGAGTC |
| | CCGCCGGGCGCAGTGGTTCACACCTGTAATCCCA |
| | GCACTTTGGGAGGCCAAGGCTGGCGGATCACGA |
| | GGTCAGGAGATCGAGACCAGTCTGGCCAACATG |
| | GTGAAACCCCCGTCTCTACAAATAATGCAAAAA |
| | CTAGTCGGGCGTGGTGGCACATGCCTGTAGTCCC |
| | AGCTGCTCCGGAGGCTGCGGCAGAATTGCTTGA |
| | ACCTGGGAGGCGGAGGTTGCAGTGAGCCAAGAT |
| | TGCGCCACTGCACTCCAGCCTGGCGACAGAGCG |
| | AGACTCCGTATCAAAAAACAAAACAAAAAAAGA |
| | GAGTCCCAGGCAGGGGGAACAGCATGTGCAAAG |
| | TCCCTGTGGCAGGACGGTGTGTGGTACAAGGGT |
| | GGGAAGAAAGCCTGTGTGCCAGAGAGGGTGTGG |
| | GTACAGCATGGCAGGAGGAGGATGGGCACGGG |
| | GGCTGGTCCTCCAGGTGCCTTGTGGACCATGCTG |
| | AGGAAGGACATAGGGAGCCATGGAAGAGGTTA |
| | GGCAGATGGCAGAGAGGTGGTCATGAGATAAGA |
| | TTTGCCTTTTACTTCCCTGGTCATCCACTGTTAAG |
| | CCCCCAGATATGCCTGGCTCCTGAGACCCCCCCC |
| | AGGGGCTGCCCTCCTGTTTCAAGTCTCCACTTTA |
| | TCTCCCTTCAGGGCTGCCCAGGGATTGCCAGGAG |
| | CTGTTCCAGGTTGGGGAGAGGCAGAGTGGACTA |
| | TTTGAAATCCAGCCTCAGGGGTCTCCGCCATTTT |
| | TGGTGAACTGCAAGATGACCTCAGGTAGGGTGT |
| | GTTAGTCCACCAGGGGCCCCTCTCCCCATAGGCC |
| | CTGTTGTCTTTCTTTAAATTGAAAACAAAACAAA |
| | ACAAAAAAATTAAAGGCAGGGTCTTGCTATGTT |
| | GCCCAAGCTGGTCTTTTTTTTTTTTTTTTTTTTTGA |
| | GATGGAGTTTTGCTCTTGGAGCTGGAGTGCAATG |
| | CCACGATCTCAGCTCACTGAAACCTCCGCCTCCC |
| | GGGTTCAAGCAATTCTCCAGCGTCAGCCTCCCCA |
| | GTAGCTGAGACTACAGGTGCGAGCAACCACACC |
| | CAGCTAATTTTTGTATTTTTAGTAGAGACTGGGT |
| | TTCACCATGTTGGTCTGGCTGGTCTCAAACTCCT |
| | GACCTCAAATGATTTGCCGACTTTGGCCTCCCAA |
| | AATGCTGGGATTATAGGCATTAGCCACTGCTCCT |
| | GGCCTCTTTTCTTTAAAATGCAGCCCTTGTCTGG |
| | GTGTAGTGGCTCATATCTGTAATCCCGACACTTT |
| | GGGAGGCCTATCATGAGGATCACTTGAGCCCAG |
| | AAGTTCGAGACCAGCCTGGACAACATAGTGAGA |
| | GCTCATCTTTACAAAAAATTTTGTAAAAGTAAAA |
| | TTTGTATTTTTAGTAGAGACGGGGTTTCACCATG |
| | TTGGCCAGGGTGGTCTTGAACTCCTGACCTCAAG |
| | TGATCTGCCCACCTCGGCCTCCCAAAGTGTTGGG |
| | ATTACAGGCGTGAGCCACAATACCCGGCCACAA |
| | ACATCTTTATAATGGTGCTCCACAGGATTCTTTT |
| | TTTTTTTTTTTTTTTGAAACAGGGTCTCACTCTGT |
| | TGCCTAAGCTGGAGTGCAGTGGTGCGATCTCGG |
| | CTCACTGCAACCTCCACCTCCCGGGTTCAAGCAA |
| | TTCTCAAAAAAAAAAAAAAATTAGGCACGGTGG |
| | CTCACACTTGCAATCCCAGCACTTTGGGAGGCTG |
| | AAGCGAGTGGATCACTTGAGCCCAGGAGACCAA |
| | TCTGAGCAACAGGGCGAAATCCTGTCTCAATTA |
| | AAAATACAAAAAACTAGCTGGGCATGGTGGTGC |
| | CTGCCTGTGTTCCCATCTACTTGGGAGGCTGAGT |
| | TGGGAGGATCTCTTGAGCCTAGGAGATAAGGCT |
| | GCAGTGAGCTGAGACTGCGCCACTGCACTCAAG |
| | CCTGGGTGACAGAGTGAGACCCCTGCCTCAAAA |
| | GAAAAAGAAAAAATGCAGGCATGGTGGCTCACA |
| | CCTGTGGTCCCAGCTACTTGGGAGGCCCAGGTAC |
| | AAGAATCACTTGAGCCCGTAAGGTTGACGCTGC |
| | ATTGAGCCATCACCACACCACTGCACTCCAGCCT |
| | GGGCAATGGAGCCAGGCCCTGTCTCAAAAAAAA |
| | TTGTTTTTAAACTTAAAAATAAGGCCGGGTGTGG |
| | GGGCTCACACCTGTAATCCCAGCACTTTGGGAG |
| | GCCGAGGTGGGTGGATCACCTGAGGTCAGGAGT |
| | TCAAAACTAGCCTGGCCAACATGGTGAAACCCT |
| | GTCTCTACTAAAAATACAAAAATTAGGCCAGGC |
| | GCAGTGGGTCATACCTGTAATCCCAGCACTTTGG |
| | GAGGCTGAGGAGGGTGGATCACATGAGGTAAGG |
| | AGTTTGAGACCAACCTGGCCAACATGGTGAAAC |
| | CCCCTCACTACTAAAAATACAAAAACTAGCCAG |
| | GCGTGGTGGCGGGTGCCTGTAATCCCGGCTACTC |
| | AGGAGGCTGAGGCATGAGAATCCCTTGAACCTG |
| | GGAGGCAGAGGTGCAGTGAGCCGAGATTGTGCC |
| | ACTGCACTCCAGCCTGGGAGATAGAGTGAGACT |
| | CAGTCTCAAAAAAAAAGACCAAAAATTAGCCAG |
| | GTGTGGTGGCAGGCGCCTGTAATCCCAGCTACTC |
| | GGGAGGCTGAGGGAGGAGAATCACTTAAACCTG |
| | AGAGACGGAGGTTGCAGTGAGCTGAGATCGCAC |
| | CACTGCACTCCAGCCTGGGTGACAGAGTAAGAC |
| | TCAATCTCAAAAAAAAAAAAGTCAAGTCCAAAG |
| | CCCAGCCTGGTCCCCAACCTGCCTCATCCTCAAC |
| | CCTATCCCTATCTCCTTTCAGCCCCATCGGTGGC |
| | TCAAAGACCTGACCATGTTCCCTCTCCCCTGACC |
| | CCGGCAGGAGGCTGGTGGTTTGGCACCTGCAGC |
| | CATTCCAACCTCAACGGCCAGTACTTCCGCTCCA |
| | TCCCACAGCAGCGGCAGAAGCTTAAGAAGGGAA |
| | TCTTCTGGAAGACCTGGCGGGGCCGCTACTACCC |
| | GCTGCAGGCCACCACCATGTTGATCCAGCCCATG |
| | GCAGCAGAGGCAGCCTCCTAGCGTCCTGGCTGG |
| | GCCTGGTCCCAGGCCCACGAAAGACGGTGACTC |
| | TTGGCTCTGCCCGAGGATGTGGCCGTTCCCTGCC |
| | TGGGCAGGGGCTCCAAGGAGGGGCCATCTGGAA |
| | ACTTGTGGACAGAGAAGAAGACCACGACTGGAG |
| | AAGCCCCCTTTCTGAGTGCAGGGGGGCTGCATG |
| | CGTTGCCTCCTGAGATCGAGGCTGCAGGATATGC |
| | TCAGACTCTAGAGGCGTGGACCAAGGGGCATGG |
| | AGCTTCACTCCTTGCTGGCCAGGGAGTTGGGGAC |
| | TCAGAGGGACCACTTGGGGCCAGCCAGACTGGC |
| | CTCAATGGCGGACTCAGTCACATTGACTGACGG |
| | GGACCAGGGCTTGTGTGGGTCGAGAGCGCCCTC |
| | ATGGTGCTGGTGCTGTTGTGTGTAGGTCCCCTGG |
| | GGACACAAGCAGGCGCCAATGGTATCTGGGCGG |
| | AGCTCACAGAGTTCTTGGAATAAAAGCAACCTC |
| | AGAACACTT |
| 13937 | AfsgsAfgCfaAfCfAfgGfaAfaCfaAfaUfsusu |
| 13938 | AfsusAfgAfgUfGfGfaAfgUfaUfuGfuAfsusu |
| 13939 | AfsusUfgAfgAfUfUfgGfaAfuGfgCfuAfsusu |
| 13940 | UfscsAfgAfuGfGfAfgGfcUfgGfaCfaAfsusu |
| 13941 | asgsagCfaAfCfAfggaaacaaaususu |
| 13942 | asusagAfgUfGfGfaaguauuguasusu |
| 13943 | asusugAfgAfUfUfggaauggcuasusu |
| 13944 | uscsagAfuGfGfAfggcuggacaasusu |
| 13945 | asUfsuUfgUfuUfcCfuguUfgCfuCfususu |
| 13946 | usAfscAfaUfaCfuUfccaCfuCfuAfususu |
| 13947 | usAfsgCfcAfuUfcCfaauCfuCfaAfususu |
| 13948 | usUfsgUfcCfaGfcCfuccAfuCfuGfasusu |
| 13949 | asUfsuugUfuuccuguUfgCfucususu |
| 13950 | usAfscaaUfacuuccaCfuCfuaususu |
| 13951 | usAfsgccAfuuccaauCfuCfaaususu |
| 13952 | usUfsgucCfagccuccAfuCfugasusu |
| 13953 | tscstsasasdCsdCsdGsdAsdGsdCsdT |
| | sdGsdAsdTsgsgsascst |
| 13954 | NfsnsNfnNfnNfNfNfnNfnNfnNfnNfnNfsnsn |
| 13955 | nsnsnnNfnNfNfNfnnnnnnnnnnsnsn |
| 13956 | nsnsnnNfnNfnNfnnnnnnnnnnsnsn |
| 13957 | NfsnsNfnNfnNfNfNfnNfnNfnNfnNfn |
| | NfsnsnN |
| 13958 | nsnsnnNfnNfNfNfnnnnnnnnnnsnsnN |
| 13959 | NfsnsNfnNfnNfnNfnNfnNfnNfnNfnNfsnsn |
| 13960 | nsNfsnNfnNfnNfnNfnnnNfnNfnNfnsnsn |
| 13961 | nsNfsnnnNfnNfNfnnnnNfnNfnnnsnsn |
| 13962 | nsNfsnnnNfnnnnnnnNfnNfnnnsnsn |
| 13963 | nsNfsnNfnNfnnnnnnnNfnNfnnnsnsn |
| 13964 | nsNfsnnnNfnNfnnnnnNfnNfnnnsnsn |
| 13965 | nsNfsnNfnNfnNfnNfnNfnNfnNfnNfnsnsn |
| 13966 | nsNfsnNfnNfnNfNfnnnnNfnNfnnnsnsn |
| 13967 | nsNfsnnnnnnnnnnnNfnnnnnsnsn |
| 13968 | nsNfsnnnNfnnnnnnnNfnNfnNfnsnsn |
| 13969 | nsnsnsnsnsdNsdNsdNsdNsdNsdNsdNs |
| | dNsdNsdNsnsnsnsnsn |
| 13970 | CAGAGUGGACUAUUUGAAA |
| 13971 | AGCUUAAGAAGGGAAUCUA |
| 13972 | GAUCGAGGCUGCAGGAUAA |
| 13973 | CAGAGUUCUUGGAAUAAAA |
| 13974 | CAGAGUGGACUAUUUGAAAUU |
| 13975 | AGCUUAAGAAGGGAAUCUAUU |
| 13976 | GAUCGAGGCUGCAGGAUAAUU |
| 13977 | CAGAGUUCUUGGAAUAAAAUU |
| 13978 | UUUCAAAUAGUCCACUCUG |
| 13979 | UAGAUUCCCUUCUUAAGCU |
| 13980 | UUAUCCUGCAGCCUCGAUC |
| 13981 | UUUUAUUCCAAGAACUCUG |
| 13982 | UUUCAAAUAGUCCACUCUGUU |
| 13983 | UAGAUUCCCUUCUUAAGCUUU |
| 13984 | UUAUCCUGCAGCCUCGAUCUU |
| 13985 | UUUUAUUCCAAGAACUCUGUU |
| 13986 | csasgaGfuGfgAfcuauuugaaasusu |
| 13987 | asgscuUfaAfgAfagggaaucuasusu |
| 13988 | gsasucGfaGfgCfugcaggauaasusu |
| 13989 | csasgaGfuUfcUfuggaauaaaasusu |
| 13990 | csasgaGfuGfGfAfcuauuugaaasusu |
| 13991 | asgscuUfaAfGfAfagggaaucuasusu |
| 13992 | gsasucGfaGfGfCfugcaggauaasusu |
| 13993 | csasgaGfuUfCfUfuggaauaaaasusu |
| 13994 | cagaGfuGfGfAfcuauuugaaasusu |
| 13995 | agcuUfaAfGfAfagggaaucuasusu |
| 13996 | gaucGfaGfGfCfugcaggauaasusu |
| 13997 | cagaGfuUfCfUfuggaauaaaasusu |
| 13998 | cagaGfuGfgAfcuauuugaaasusu |
| 13999 | agcuUfaAfgAfagggaaucuasusu |
| 14000 | gaucGfaGfgCfugcaggauaasusu |
| 14001 | cagaGfuUfcUfuggaauaaaasusu |
| 14002 | CfsasGfaGfuGfgAfcUfaUfuUfgAfaAfsusu |
| 14003 | AfsgsCfuUfaAfgAfaGfgGfaAfuCfuAfsusu |
| 14004 | GfsasUfcGfaGfgCfuGfcAfgGfaUfaAfsusu |
| 14005 | CfsasGfaGfuUfcUfuGfgAfaUfaAfaAfsusu |
| 14006 | CAGAGUUCUUGGAAUAAAAUU, |
| | with modification pattern 1S |
| 14007 | CAGAGUUCUUGGAAUAAAAUU, |
| | with modification pattern 2S |
| 14008 | CAGAGUUCUUGGAAUAAAAUU, |
| | with modification pattern 3S |
| 14009 | CAGAGUUCUUGGAAUAAAAUU, |
| | with modification pattern 4S |
| 14010 | CAGAGUUCUUGGAAUAAAAUU, |
| | with modification pattern 5S |
| 14011 | CAGAGUUCUUGGAAUAAAAUU, |
| | with modification pattern 6S |
| 14012 | GfsusGfaUfcCfGfAfuUfcUfuUfcCfaAfsusu |
| 14013 | UfsgsAfuCfcGfAfUfuCfuUfuCfcAfgAfsusu |
| 14014 | GfsasUfcCfgAfUfUfcUfuUfcCfaGfcAfsusu |
| 14015 | AfsusCfcGfaUfUfCfuUfuCfcAfgCfgAfsusu |
| 14016 | UfsusCfuGfcAfAfCfcAfaGfcGfgGfuAfsusu |
| 14017 | AfscsGfuCfcCfCfGfaGfaGfuCfcCfcAfsusu |
| 14018 | UfsgsCfgUfcCfUfGfgGfaCfgAfgAfuAfsusu |
| 14019 | GfsgsGfaCfgAfGfAfuGfaAfuGfuCfcAfsusu |
| 14020 | GfsasCfgAfgAfUfGfaAfuGfuCfcUfgAfsusu |
| 14021 | UfsgsAfaUfgUfCfCfuGfgCfgCfaCfgAfsusu |
| 14022 | GfsasAfuGfuCfCfUfgGfcGfcAfcGfgAfsusu |
| 14023 | AfsasUfgUfcCfUfGfgCfgCfaCfgGfaAfsusu |
| 14024 | AfsusGfuCfcUfGfGfcGfcAfcGfgAfcAfsusu |
| 14025 | UfsgsUfcCfuGfGfCfgCfaCfgGfaCfuAfsusu |
| 14026 | GfsgsCfcAfgGfGfGfcUfgCfgCfgAfaAfsusu |
| 14027 | CfscsAfgGfgGfCfUfgCfgCfgAfaCfaAfsusu |
| 14028 | GfsgsGfgCfuGfCfGfcGfaAfcAfcGfcAfsusu |
| 14029 | GfsgsCfuGfcGfCfGfaAfcAfcGfcGfgAfsusu |
| 14030 | GfscsUfgCfgCfGfAfaCfaCfgCfgGfaAfsusu |
| 14031 | CfsusGfcGfcGfAfAfcAfcGfcGfgAfgAfsusu |
| 14032 | UfsgsCfgCfgAfAfCfaCfgCfgGfaGfcAfsusu |
| 14033 | GfscsGfcGfaAfCfAfcGfcGfgAfgCfgAfsusu |
| 14034 | CfsgsCfgAfaCfAfCfgCfgGfaGfcGfcAfsusu |
| 14035 | GfscsGfaAfcAfCfGfcGfgAfgCfgCfaAfsusu |
| 14036 | CfsgsAfaCfaCfGfCfgGfaGfcGfcAfcAfsusu |
| 14037 | AfsasCfaCfgCfGfGfaGfcGfcAfcCfcAfsusu |
| 14038 | AfscsAfcGfcGfGfAfgCfgCfaCfcCfgAfsusu |
| 14039 | CfsasCfgCfgGfAfGfcGfcAfcCfcGfcAfsusu |
| 14040 | GfscsGfgAfgCfGfCfaCfcCfgCfaGfuAfsusu |
| 14041 | GfscsGfcAfcCfCfGfcAfgUfcAfgCfuAfsusu |
| 14042 | GfscsAfcCfcGfCfAfgUfcAfgCfuGfaAfsusu |
| 14043 | GfsgsAfaCfcGfAfGfgGfgUfcCfaCfcAfsusu |
| 14044 | GfsasAfcCfgAfGfGfgGfuCfcAfcCfgAfsusu |
| 14045 | AfscsCfuCfcCfGfUfuAfgCfcCfcUfgAfsusu |
| 14046 | CfscsUfcCfcGfUfUfaGfcCfcCfuGfaAfsusu |
| 14047 | CfscsGfuUfaGfCfCfcCfuGfaGfaGfcAfsusu |
| 14048 | UfsgsCfaGfaCfAfCfaAfcUfcAfaGfgAfsusu |
| 14049 | AfsgsAfcAfcAfAfCfuCfaAfgGfcUfcAfsusu |
| 14050 | CfsasGfgAfuCfCfAfgCfaAfcUfcUfuAfsusu |
| 14051 | AfsgsCfaAfcUfCfUfuCfcAfcAfaGfgAfsusu |
| 14052 | CfsasAfcUfcUfUfCfcAfcAfaGfgUfgAfsusu |
| 14053 | AfsasCfuCfuUfCfCfaCfaAfgGfuGfgAfsusu |
| 14054 | AfsgsCfaCfcUfGfCfgAfaUfuCfaGfcAfsusu |
| 14055 | CfscsUfaGfaCfCfAfuGfaGfgUfgGfcAfsusu |
| 14056 | GfsgsCfcAfaGfCfCfuGfcCfcGfaAfgAfsusu |
| 14057 | CfscsAfaGfcCfUfGfcCfcGfaAfgAfaAfsusu |
| 14058 | AfsgsCfcUfgCfCfCfgAfaGfaAfaGfaAfsusu |
| 14059 | UfsgsGfaGfgCfUfGfgAfcAfgUfaAfuAfsusu |
| 14060 | GfsgsCfuGfgAfCfAfgUfaAfuUfcAfgAfsusu |
| 14061 | CfsasGfuAfaUfUfCfaGfaGfgCfgCfcAfsusu |
| 14062 | AfsgsUfaAfuUfCfAfgAfgGfcGfcCfaAfsusu |
| 14063 | GfsusAfaUfuCfAfGfaGfgCfgCfcAfcAfsusu |
| 14064 | UfsasAfuUfcAfGfAfgGfcGfcCfaCfgAfsusu |
| 14065 | AfsgsAfgGfcGfCfCfaCfgAfuGfgCfuAfsusu |
| 14066 | UfsgsGfaCfuUfCfAfaCfcGfgCfcCfuAfsusu |
| 14067 | GfsgsAfcUfuCfAfAfcCfgGfcCfcUfgAfsusu |
| 14068 | UfsusCfaAfcCfGfGfcCfcUfgGfgAfaAfsusu |
| 14069 | CfsusGfgGfaAfGfCfcUfaCfaAfgGfcAfsusu |
| 14070 | UfsgsGfgAfaGfCfCfuAfcAfaGfgCfgAfsusu |
| 14071 | GfscsCfuAfcAfAfGfgCfgGfgGfuUfuAfsusu |
| 14072 | UfsasCfaAfgGfCfGfgGfgUfuUfgGfgAfsusu |
| 14073 | GfsgsCfgGfgGfUfUfuGfgGfgAfuCfcAfsusu |
| 14074 | GfsasGfaAfgGfUfGfcAfuAfgCfaUfcAfsusu |
| 14075 | GfsgsAfcUfgGfGfAfuGfgCfaAfcGfcAfsusu |
| 14076 | GfsasCfuGfgGfAfUfgGfcAfaCfgCfcAfsusu |
| 14077 | UfsgsGfgAfuGfGfCfaAfcGfcCfgAfgAfsusu |
| 14078 | CfsgsUfgCfaCfCfUfgGfgUfgGfcGfaAfsusu |
| 14079 | CfsusCfcGfuAfCfCfcUfuCfuCfcAfcAfsusu |
| 14080 | UfscsCfgUfaCfCfCfuUfcUfcCfaCfuAfsusu |
| 14081 | GfsusAfcCfcUfUfCfuCfcAfcUfuGfgAfsusu |
| 14082 | AfscsUfuGfgGfAfCfcAfgGfaUfcAfcAfsusu |
| 14083 | UfsusGfgGfaCfCfAfgGfaUfcAfcGfaAfsusu |
| 14084 | GfsgsGfaCfcAfGfGfaUfcAfcGfaCfcAfsusu |
| 14085 | GfsgsAfcCfaGfGfAfuCfaCfgAfcCfuAfsusu |
| 14086 | GfsasCfcAfgGfAfUfcAfcGfaCfcUfcAfsusu |
| 14087 | CfscsAfgGfaUfCfAfcGfaCfcUfcCfgAfsusu |
| 14088 | CfsasGfgAfuCfAfCfgAfcCfuCfcGfcAfsusu |
| 14089 | GfsasUfcAfcGfAfCfcUfcCfgCfaGfgAfsusu |
| 14090 | AfsusCfaCfgAfCfCfuCfcGfcAfgGfgAfsusu |
| 14091 | CfsasCfgAfcCfUfCfcGfcAfgGfgAfcAfsusu |
| 14092 | AfscsGfaCfcUfCfCfgCfaGfgGfaCfaAfsusu |
| 14093 | CfsgsAfcCfuCfCfGfcAfgGfgAfcAfaAfsusu |
| 14094 | UfscsCfgCfaGfGfGfaCfaAfgAfaCfuAfsusu |
| 14095 | CfscsGfcAfgGfGfAfcAfaGfaAfcUfgAfsusu |
| 14096 | GfsgsCfcAfgUfAfCfuUfcCfgCfuCfcAfsusu |
| 14097 | GfscsCfaGfuAfCfUfuCfcGfcUfcCfaAfsusu |
| 14098 | GfsgsCfgGfgGfCfCfgCfuAfcUfaCfcAfsusu |
| 14099 | CfsasGfgCfcAfCfCfaCfcAfuGfuUfgAfsusu |
| 14100 | CfsasCfcAfcCfAfUfgUfuGfaUfcCfaAfsusu |
| 14101 | AfscsCfaUfgUfUfGfaUfcCfaGfcCfcAfsusu |
| 14102 | CfscsAfuGfuUfGfAfuCfcAfgCfcCfaAfsusu |
| 14103 | GfsasCfuCfuUfGfGfcUfcUfgCfcCfgAfsusu |
| 14104 | AfscsUfcUfuGfGfCfuCfuGfcCfcGfaAfsusu |
| 14105 | UfsgsCfcUfcCfUfGfaGfaUfcGfaGfgAfsusu |
| 14106 | GfscsCfuCfcUfGfAfgAfuCfgAfgGfcAfsusu |
| 14107 | CfscsUfcCfuGfAfGfaUfcGfaGfgCfuAfsusu |
| 14108 | AfsgsAfgGfcGfUfGfgAfcCfaAfgGfgAfsusu |
| 14109 | GfsasGfgCfgUfGfGfaCfcAfaGfgGfgAfsusu |
| 14110 | UfsgsGfaCfcAfAfGfgGfgCfaUfgGfaAfsusu |
| 14111 | UfsgsUfuGfuGfUfGfuAfgGfuCfcCfcAfsusu |
| 14112 | GfsusGfuGfuAfGfGfuCfcCfcUfgGfgAfsusu |
| 14113 | UfsgsUfaGfgUfCfCfcCfuGfgGfgAfcAfsusu |
| 14114 | usgsugAfuCfCfGfauucuuuccasusu |
| 14115 | csusgcGfaAfUfUfcagcaucugasusu |
| 14116 | usgscgAfaUfUfCfagcaucugcasusu |
| 14117 | gscsgaAfuUfCfAfgcaucugcaasusu |
| 14118 | asasagCfcAfGfUfuuggccuccasusu |
| 14119 | usgsgaCfcAfCfAfagcaccuagasusu |
| 14120 | csasgaGfuGfGfAfcuauuugaaasusu |
| 14121 | ususuuUfgGfUfGfaacugcaagasusu |
| 14122 | asgscgGfcAfGfAfagcuuaagaasusu |
| 14123 | asgscuUfaAfGfAfagggaaucuasusu |
| 14124 | gsgsccAfuCfUfGfgaaacuuguasusu |
| 14125 | gscscaUfcUfGfGfaaacuugugasusu |
| 14126 | asusgcGfuUfGfCfcuccugagaasusu |
| 14127 | gsasucGfaGfGfCfugcaggauaasusu |
| 14128 | asuscgAfgGfCfUfgcaggauauasusu |
| 14129 | usgscaGfgAfUfAfugcucagacasusu |
| 14130 | asusgcUfcAfGfAfcucuagaggasusu |
| 14131 | uscsaaUfgGfCfGfgacucagucasusu |
| 14132 | csasgaGfuUfCfUfuggaauaaaasusu |
| 14133 | gsasguUfcUfUfGfgaauaaaagasusu |
| 14134 | usUfsucaAfauaguccAfcUfcugsusu |
| 14135 | usAfsgauUfcccuucuUfaAfgcususu |
| 14136 | usUfsaucCfugcagccUfcGfaucsusu |
| 14137 | usUfsuuaUfuccaagaAfcUfcugsusu |
| 14138 | usUfsuCfaAfaUfAfguccAfcUfcugsusu |
| 14139 | usAfsgAfuUfcCfCfuucuUfaAfgcususu |
| 14140 | usUfsaUfcCfuGfCfagccUfcGfaucsusu |
| 14141 | usUfsuUfaUfuCfCfaagaAfcUfcugsusu |
| 14142 | usUfsuCfaAfauaguccAfcUfcugsusu |
| 14143 | usAfsgAfuUfcccuucuUfaAfgcususu |
| 14144 | usUfsaUfcCfugcagccUfcGfaucsusu |
| 14145 | usUfsuUfaUfuccaagaAfcUfcugsusu |
| 14146 | usUfsucaAfaUfaguccAfcUfcugsusu |
| 14147 | usAfsgauUfcCfcuucuUfaAfgcususu |
| 14148 | usUfsaucCfuGfcagccUfcGfaucsusu |
| 14149 | usUfsuuaUfuCfcaagaAfcUfcugsusu |
| 14150 | usUfsucaaauaguccAfcucugsusu |
| 14151 | usAfsgauucccuucuUfaagcususu |
| 14152 | usUfsauccugcagccUfcgaucsusu |
| 14153 | usUfsuuauuccaagaAfcucugsusu |
| 14154 | usUfsuCfaAfaUfaGfuccAfcUfcUfgsusu |
| 14155 | usAfsgAfuUfcCfcUfucuUfaAfgCfususu |
| 14156 | usUfsaUfcCfuGfcAfgccUfcGfaUfcsusu |
| 14157 | usUfsuUfaUfuCfcAfagaAfcUfcUfgsusu |
| 14158 | UUUUAUUCCAAGAACUCUGUU, with |
| | modification pattern 1AS |
| 14159 | UUUUAUUCCAAGAACUCUGUU, with |
| | modification pattern 2AS |
| 14160 | UUUUAUUCCAAGAACUCUGUU, with |
| | modification pattern 3AS |
| 14161 | UUUUAUUCCAAGAACUCUGUU, with |
| | modification pattern 4AS |
| 14162 | UUUUAUUCCAAGAACUCUGUU, with |
| | modification pattern 5AS |
| 14163 | UUUUAUUCCAAGAACUCUGUU, with |
| | modification pattern 6AS |
| 14164 | UUUUAUUCCAAGAACUCUGUU, with |
| | modification pattern 7AS |
| 14165 | UUUUAUUCCAAGAACUCUGUU, with |
| | modification pattern 8AS |
| 14166 | UUUUAUUCCAAGAACUCUGUU, with |
| | modification pattern 9AS |
| 14167 | usUfsgGfaAfaGfaAfucgGfaUfcAfcsusu |
| 14168 | usCfsuGfgAfaAfgAfaucGfgAfuCfasusu |
| 14169 | usGfscUfgGfaAfaGfaauCfgGfaUfcsusu |
| 14170 | usCfsgCfuGfgAfaAfgaaUfcGfgAfususu |
| 14171 | usAfscCfcGfcUfuGfguuGfcAfgAfasusu |
| 14172 | usGfsgGfgAfcUfcUfcggGfgAfcGfususu |
| 14173 | usAfsuCfuCfgUfcCfcagGfaCfgCfasusu |
| 14174 | usGfsgAfcAfuUfcAfucuCfgUfcCfcsusu |
| 14175 | usCfsaGfgAfcAfuUfcauCfuCfgUfcsusu |
| 14176 | usCfsgUfgCfgCfcAfggaCfaUfuCfasusu |
| 14177 | usCfscGfuGfcGfcCfaggAfcAfuUfcsusu |
| 14178 | usUfscCfgUfgCfgCfcagGfaCfaUfususu |
| 14179 | usGfsuCfcGfuGfcGfccaGfgAfcAfususu |
| 14180 | usAfsgUfcCfgUfgCfgccAfgGfaCfasusu |
| 14181 | usUfsuCfgCfgCfaGfcccCfuGfgCfcsusu |
| 14182 | usUfsgUfuCfgCfgCfagcCfcCfuGfgsusu |
| 14183 | usGfscGfuGfuUfcGfcgcAfgCfcCfcsusu |
| 14184 | usCfscGfcGfuGfuUfcgcGfcAfgCfcsusu |
| 14185 | usUfscCfgCfgUfgUfucgCfgCfaGfcsusu |
| 14186 | usCfsuCfcGfcGfuGfuucGfcGfcAfgsusu |
| 14187 | usGfscUfcCfgCfgUfguuCfgCfgCfasusu |
| 14188 | usCfsgCfuCfcGfcGfuguUfcGfcGfcsusu |
| 14189 | usGfscGfcUfcCfgCfgugUfuCfgCfgsusu |
| 14190 | usUfsgCfgCfuCfcGfcguGfuUfcGfcsusu |
| 14191 | usGfsuGfcGfcUfcCfgcgUfgUfuCfgsusu |
| 14192 | usGfsgGfuGfcGfcUfccgCfgUfgUfususu |
| 14193 | usCfsgGfgUfgCfgCfuccGfcGfuGfususu |
| 14194 | usGfscGfgGfuGfcGfcucCfgCfgUfgsusu |
| 14195 | usAfscUfgCfgGfgUfgcgCfuCfcGfcsusu |
| 14196 | usAfsgCfuGfaCfuGfcggGfuGfcGfcsusu |
| 14197 | usUfscAfgCfuGfaCfugcGfgGfuGfcsusu |
| 14198 | usGfsgUfgGfaCfcCfcucGfgUfuCfcsusu |
| 14199 | usCfsgGfuGfgAfcCfccuCfgGfuUfcsusu |
| 14200 | usCfsaGfgGfgCfuAfacgGfgAfgGfususu |
| 14201 | usUfscAfgGfgGfcUfaacGfgGfaGfgsusu |
| 14202 | usGfscUfcUfcAfgGfggcUfaAfcGfgsusu |
| 14203 | usCfscUfuGfaGfuUfgugUfcUfgCfasusu |
| 14204 | usGfsaGfcCfuUfgAfguuGfuGfuCfususu |
| 14205 | usAfsaGfaGfuUfgCfuggAfuCfcUfgsusu |
| 14206 | usCfscUfuGfuGfgAfagaGfuUfgCfususu |
| 14207 | usCfsaCfcUfuGfuGfgaaGfaGfuUfgsusu |
| 14208 | usCfscAfcCfuUfgUfggaAfgAfgUfususu |
| 14209 | usGfscUfgAfaUfuCfgcaGfgUfgCfususu |
| 14210 | usGfscCfaCfcUfcAfuggUfcUfaGfgsusu |
| 14211 | usCfsuUfcGfgGfcAfggcUfuGfgCfcsusu |
| 14212 | usUfsuCfuUfcGfgGfcagGfcUfuGfgsusu |
| 14213 | usUfscUfuUfcUfuCfgggCfaGfgCfususu |
| 14214 | usAfsuUfaCfuGfuCfcagCfcUfcCfasusu |
| 14215 | usCfsuGfaAfuUfaCfuguCfcAfgCfcsusu |
| 14216 | usGfsgCfgCfcUfcUfgaaUfuAfcUfgsusu |
| 14217 | usUfsgGfcGfcCfuCfugaAfuUfaCfususu |
| 14218 | usGfsuGfgCfgCfcUfcugAfaUfuAfcsusu |
| 14219 | usCfsgUfgGfcGfcCfucuGfaAfuUfasusu |
| 14220 | usAfsgCfcAfuCfgUfggcGfcCfuCfususu |
| 14221 | usAfsgGfgCfcGfgUfugaAfgUfcCfasusu |
| 14222 | usCfsaGfgGfcCfgGfuugAfaGfuCfcsusu |
| 14223 | usUfsuCfcCfaGfgGfccgGfuUfgAfasusu |
| 14224 | usGfscCfuUfgUfaGfgcuUfcCfcAfgsusu |
| 14225 | usCfsgCfcUfuGfuAfggcUfuCfcCfasusu |
| 14226 | usAfsaAfcCfcCfgCfcuuGfuAfgGfcsusu |
| 14227 | usCfscCfaAfaCfcCfcgcCfuUfgUfasusu |
| 14228 | usGfsgAfuCfcCfcAfaacCfcCfgCfcsusu |
| 14229 | usGfsaUfgCfuAfuGfcacCfuUfcUfcsusu |
| 14230 | usGfscGfuUfgCfcAfuccCfaGfuCfcsusu |
| 14231 | usGfsgCfgUfuGfcCfaucCfcAfgUfcsusu |
| 14232 | usCfsuCfgGfcGfuUfgccAfuCfcCfasusu |
| 14233 | usUfscGfcCfaCfcCfaggUfgCfaCfgsusu |
| 14234 | usGfsuGfgAfgAfaGfgguAfcGfgAfgsusu |
| 14235 | usAfsgUfgGfaGfaAfgggUfaCfgGfasusu |
| 14236 | usCfscAfaGfuGfgAfgaaGfgGfuAfcsusu |
| 14237 | usGfsuGfaUfcCfuGfgucCfcAfaGfususu |
| 14238 | usUfscGfuGfaUfcCfuggUfcCfcAfasusu |
| 14239 | usGfsgUfcGfuGfaUfccuGfgUfcCfcsusu |
| 14240 | usAfsgGfuCfgUfgAfuccUfgGfuCfcsusu |
| 14241 | usGfsaGfgUfcGfuGfaucCfuGfgUfcsusu |
| 14242 | usCfsgGfaGfgUfcGfugaUfcCfuGfgsusu |
| 14243 | usGfscGfgAfgGfuCfgugAfuCfcUfgsusu |
| 14244 | usCfscUfgCfgGfaGfgucGfuGfaUfcsusu |
| 14245 | usCfscCfuGfcGfgAfgguCfgUfgAfususu |
| 14246 | usGfsuCfcCfuGfcGfgagGfuCfgUfgsusu |
| 14247 | usUfsgUfcCfcUfgCfggaGfgUfcGfususu |
| 14248 | usUfsuGfuCfcCfuGfcggAfgGfuCfgsusu |
| 14249 | usAfsgUfuCfuUfgUfcccUfgCfgGfasusu |
| 14250 | usCfsaGfuUfcUfuGfuccCfuGfcGfgsusu |
| 14251 | usGfsgAfgCfgGfaAfguaCfuGfgCfcsusu |
| 14252 | usUfsgGfaGfcGfgAfaguAfcUfgGfcsusu |
| 14253 | usGfsgUfaGfuAfgCfggcCfcCfgCfcsusu |
| 14254 | usCfsaAfcAfuGfgUfgguGfgCfcUfgsusu |
| 14255 | usUfsgGfaUfcAfaCfaugGfuGfgUfgsusu |
| 14256 | usGfsgGfcUfgGfaUfcaaCfaUfgGfususu |
| 14257 | usUfsgGfgCfuGfgAfucaAfcAfuGfgsusu |
| 14258 | usCfsgGfgCfaGfaGfccaAfgAfgUfcsusu |
| 14259 | usUfscGfgGfcAfgAfgccAfaGfaGfususu |
| 14260 | usCfscUfcGfaUfcUfcagGfaGfgCfasusu |
| 14261 | usGfscCfuCfgAfuCfucaGfgAfgGfcsusu |
| 14262 | usAfsgCfcUfcGfaUfcucAfgGfaGfgsusu |
| 14263 | usCfscCfuUfgGfuCfcacGfcCfuCfususu |
| 14264 | usCfscCfcUfuGfgUfccaCfgCfcUfcsusu |
| 14265 | usUfscCfaUfgCfcCfcuuGfgUfcCfasusu |
| 14266 | usGfsgGfgAfcCfuAfcacAfcAfaCfasusu |
| 14267 | usCfscCfaGfgGfgAfccuAfcAfcAfcsusu |
| 14268 | usGfsuCfcCfcAfgGfggaCfcUfaCfasusu |
| 14269 | usGfsgaaAfgaaucggAfuCfacasusu |
| 14270 | usCfsagaUfgcugaauUfcGfcagsusu |
| 14271 | usGfscagAfugcugaaUfuCfgcasusu |
| 14272 | usUfsgcaGfaugcugaAfuUfcgcsusu |
| 14273 | usGfsgagGfccaaacuGfgCfuuususu |
| 14274 | usCfsuagGfugcuuguGfgUfccasusu |
| 14275 | usUfsucaAfauaguccAfcUfcugsusu |
| 14276 | usCfsuugCfaguucacCfaAfaaasusu |
| 1427 | usUfscuuAfagcuucuGfcCfgcususu |
| 14278 | usAfsgauUfcccuucuUfaAfgcususu |
| 14279 | usAfscaaGfuuuccagAfuGfgccsusu |
| 14280 | usCfsacaAfguuuccaGfaUfggcsusu |
| 14281 | usUfscucAfggaggcaAfcGfcaususu |
| 14282 | usUfsaucCfugcagccUfcGfaucsusu |
| 14283 | usAfsuauCfcugcagcCfuCfgaususu |
| 14284 | usGfsucuGfagcauauCfcUfgcasusu |
| 14285 | usCfscucUfagagucuGfaGfcaususu |
| 14286 | usGfsacuGfaguccgcCfaUfugasusu |
| 14287 | usUfsuuaUfuccaagaAfcUfcugsusu |
| 14288 | usCfsuuuUfauuccaaGfaAfcucsusu |
| 14289 | gsgsacAfaUfAfCfuuccacucuasusu |
| 14290 | usAfsgagUfggaaguaUfuGfuccsusu |
| 14291 | asgscaGfaAfUfCfugagaauacasusu |
| 14292 | usGfsuauUfcucagauUfcUfgcususu |
| 14293 | nsnsnnNfNfNfNfNfnnnnnnnnnnsnsn |
| 14294 | nsnsnnnNfNfNfNfnnnnnnnnnnsnsn |
| 14295 | nsnsnnnnNfNfNfNfnnnnnnnnnsnsn |
| 14296 | nsNfsnnnnnnnnnnnNfnNfnnnsnsn |
| 14297 | nsNfsnnnNfnnNfnnnnNfnNfnnnsnsn |
| 14298 | usUfsuUfaUfuCfcAfaGfaAfcUfcUfgsusu |
| 14299 | csasgagUfUfCfUfuggaauaaaasusu |
| 14300 | sggacAfGfuAfAfuucagaggcasusu |
| 14301 | suggaGfAfaGfGfuGfcauagcaasusu |
| 14302 | saccaccAfuGfuugauccagasusu |
| 14303 | sugcugUfUfgUfgUfguaggucasusu |
| 14304 | usGfscCfuCfuGfaAfuUfaCfuGfuCfcsusu |
| 14305 | usUfsgCfuAfuGfcAfcCfuUfcUfcCfasusu |
| 14306 | usCfsuGfgAfuCfaAfcAfuGfgUfgGfususu |
| 14307 | usGfsaCfcUfaCfaCfaCfaAfcAfgCfasusu |
| 14308 | scagagUfUfCfUfuggaauaaaasusu |
| 14309 | scagagUfUfCfUfuggaauaaaasusu |
| 14310 | scagagUfUfCfUfuggaauaaaasusu |
| 14311 | scagagUfUfCfUfuggaauaaaasusu |
| 14312 | scagagUfUfCfUfuggaauaaaasusu |
| 14313 | scagagUfUfCfUfudGgaauaaaasusu |
| 14314 | suaUfgCfuCfadGacucuagagasusu |
| 14315 | usUfsuUfaUfuCfcAfaGfaAfcUfcUfgsusu |
| 14316 | usUfsuuaUfuCfcAfaGfaAfcUfcUfgsusu |
| 14317 | usUfsusUfaUfuCfcAfaGfaAfcUfcUfgsusu |
| 14318 | usUfsuUfaUfuccAfaGfaAfcUfcUfgsusu |
| 14319 | usUfsuUfaUfuccaaGfaAfcUfcUfgsusu |
| 14320 | usUfsuUfaUfuCfcAfaGfaAfcUfcUfgsusu |
| 14321 | usCfsuCfuAfgAfgUfcUfgAfgCfaUfasusu |
| 14322 | snnnnNfNfnNfNfnnnnnnnnnnsnsn |
| 14323 | snnnnNfNfnNfNfnNfnnnnnnnnsnsn |
| 14324 | snnnnnnNfnNfnnnnnnnnnnsnsn |
| 14325 | snnnnnNfNfnNfnNfnnnnnnnnsnsn |
| 14326 | snnnnnNfNfNfNfnnnnnnnnnnsnsn |
| 14327 | snnnnnNfNfNfNfndNnnnnnnnnsnsn |
| 14328 | snnNfnNfnNfndNnnnnnnnnnnsnsn |
| 14329 | nsNfsnnnNfnNfnNfnNfnNfnNfnNfnsnsn |
| 14330 | nsNfsnsNfnNfnNfnNfnNfnNfnNfnNfnsnsn |
| 14331 | nsNfsnNfnNfnnnNfnNfnNfnNfnNfnsnsn |
| 14332 | nsNfsnNfnNfnnnnnNfnNfnNfnNfnsnsn |

In Table 1.2, Nf (e.g. Af, Cf, Gf, Tf or Uf) indicates a 2′ fluoro-modified nucleoside, n (e.g. a, c, g, t or u) indicates a 2′ O-methyl modified nucleoside, and “s” indicates a phosphorothioate linkage. g, t or u) indicates a 2′ O-methyl modified nucleoside, and “s” indicates a phosphorothioate linkage.

### V. Examples

[0315] The following examples are included for illustrative purposes only and are not intended to limit the scope of the invention.

### Example 1: Loss of Function Variants in ANGPTL4 Are Associated with Decreased Risk of Cardiovascular and Metabolic Disease

[0316] Approximately 30,000,000 imputed variants were analyzed in ˜375,000 individuals from the UK Biobank cohort for associations with cardiometabolic traits including circulating triglyceride levels, hyperlipidemia, chronic ischemic heart disease, myocardial infarction, Type 2 diabetes, and lipid-lowering and diabetes medication use. Additionally, rare loss of function variants were evaluated in a gene burden test in a subset of ˜45,000 individuals from the UK Biobank cohort with available exome sequencing data. Case counts in the full and exome-sequenced cohorts are shown in Table 2.

TABLE 2
Case and Value Counts for Tested Cardiometabolic Traits

| | Imputed | Exome |
|---|---|---|
| | Genotypes | Sequencing |
| Trait | Cases/Counts | Cases/Counts |
| Hyperlipidemia | 80,196 | 10,112 |
| Chronic ischemic heart disease | 26,771 | 3,135 |
| Angina pectoris | 22,200 | 2,685 |
| Myocardial Infarction | 15,250 | 1,616 |
| Type 2 diabetes mellitus | 20,663 | 2,512 |
| Medication - simvastatin | 42,197 | 5,404 |
| Medication - metformin | 9,262 | 1,184 |
| Family history of heart disease | 162,657 | 20,211 |
| Family history of diabetes | 76,202 | 9,845 |
| Blood Triglycerides | 356,875 | 43,055 |
| Blood HDL | 327,461 | 40,600 |

[0317] Protective associations were observed between a low-frequency and a rare missense variant (rs116843064; MAF=0.02 and rs140744493; MAF=0.003) within ANGPTL4 and cardiometabolic traits (see Table 3). The major allele (chr19-8429323-G, hg19) of the rs116843064 variant encodes for a glutamic acid residue and the minor allele (chr19-8429323-A, hg19) a lysine at amino acid position 40 of the full length ANGPTL4 protein (Glu40Lys; E40K). A lysine at position 40 reduces the inhibition of LPL by ANGPTL4; rs116843064 is thus a loss of function variant. The major allele (chr19-8436373-C, hg19) of the rs140744493 variant encodes for an arginine residue and the minor allele (chr19-8436373-T, hg19) a cysteine at amino acid position 336 of the full length ANGPTL4 protein (Arg336Cys; R336C). A cysteine at position 336 impairs cellular secretion of ANGPTL4; rs140744493 is thus also a loss of function variant. Carriers of the minor allele of both of these variants had a reduced risk of a range of cardiometabolic diseases, as well as reduced circulating triglycerides (p=2.35×10\hat{ }−145; beta=−0.048 and p=2.64×10\hat{ }−4; beta=−0.018 for rs116843064 and rs140744493, respectively) and increased high density lipoprotein levels (p=2.35×10\hat{ }−145; beta=−0.048 and p=2.64×10\hat{ }−4; beta=−0.018 for rs116843064 and rs140744493, respectively). Accordingly, in some cases therapeutic inhibition or modulation of ANGPTL4 may be an effective genetically-informed method of treatment for cardiovascular and metabolic disease.

TABLE 3
Association of ANGPTL4 Missense Variants with Cardiometabolic Traits

| | rs116843064 (E40K) | | rs140744493 (R336C) | |
|---|---|---|---|---|
| Trait | Effect Size | P | Effect Size | P |
| Hyperlipidemia | 0.87 (OR) | 2.04E−10 | NS | NS |
| Chronic ischemic heart disease | 0.84 (OR) | 1.03E−06 | NS | NS |
| Angina pectoris | 0.85 (OR) | 1.59E−05 | 0.81 (OR) | 0.04 |
| Myocardial Infarction | 0.85 (OR) | 4.53E−04 | NS | NS |
| Type 2 diabetes mellitus | 0.88 (OR) | 7.31E−04 | NS | NS |
| Medication - simvastatin | 0.91 (OR) | 1.13E−03 | 0.83 (OR) | 0.01 |
| Medication - metformin | 0.79 (OR) | 9.11E−05 | NS | NS |
| Family history of heart disease | 0.95 (OR) | 5.55E−03 | 0.91 (OR) | 0.04 |
| Family history of diabetes | 0.94 (OR) | 2.20E−03 | NS | NS |
| Blood Triglycerides | −0.048 (beta) | 2.35E−145 | −0.018 (beta) | 2.13E−04 |
| Blood HDL | 0.023 (beta) | 3.15E−115 | 0.011 (beta) | 9.70E−06 |

NS = Not Significant,
OR = Odds Ratio

[0318] Using the subset of individuals with available exome sequencing data (approximately 45,000 of the 375,000 individuals), a gene burden test was applied to assess the association of ANGPTL4 loss of function variants on cardiometabolic traits. Gene burden tests are used to aggregate rare variants in a gene by functional class that are too rare to be tested individually. In total, 17 rare predicted loss of function variants (frameshift, stop gained and splice donor/acceptor variants) in 72 total carriers were tested. Individuals carrying predicted ANGPTL4 loss of function variants had significantly lower triglyceride levels when compared to non-carriers (p=2.64E-4; beta=−0.097). These results are directionally consistent with the results obtained in the larger cohort for the rs116843064 and rs140744493 inactivating missense variants, and further confirm that ANGPTL4 loss of function results in lower circulating triglyceride levels.

### Example 2: Bioinformatic Selection of Sequences in Order to Identify Therapeutic siRNAs to Downmodulate Expression of the ANGPTL4 mRNA

[0319] Screening sets were defined based on bioinformatic analysis. Therapeutic siRNAs were designed to target human ANGPTL4, and the ANGPTL4 sequence of at least one toxicology-relevant species, in this case, the non-human primates (NHP) rhesus and cynomolgus monkeys. Drivers for the design of the screening set were predicted specificity of the siRNAs against the transcriptome of the relevant species as well as cross-reactivity between species. Predicted specificity in human, rhesus monkey, cynomolgus monkey, mouse and rat was determined for sense (S) and antisense (AS) strands. These were assigned a “specificity score” which considers the likelihood of unintended downregulation of any other transcript by full or partial complementarity of an siRNA strand (up to 4 mismatches within positions 2-18) as well as the number and positions of mismatches. Thus, off-target(s) for antisense and sense strands of each siRNA were identified. In addition, the number of potential off-targets was used as an additional specificity factor in the specificity score. As identified, siRNAs with high specificity and a low number of predicted off-targets provide a benefit of increased targeting specificity.

[0320] In addition to selecting siRNA sequences with high sequence specificity to ANGPTL4 mRNA, siRNA sequences within the seed region were analyzed for similarity to seed regions of known miRNAs. siRNAs can function in a miRNA like manner via base-pairing with complementary sequences within the 3′-UTR of mRNA molecules. The complementarity typically encompasses the 5′-bases at positions 2-7 of the miRNA (seed region). To circumvent siRNAs to act via functional miRNA binding sites, siRNA strands containing natural miRNA seed regions were avoided. Seed regions identified in miRNAs from human, mouse, rat, rhesus monkey, dog, rabbit and pig are referred to as “conserved”. Combining the “specificity score” with miRNA seed analysis yielded a “specificity category”. This is divided into categories 1-4, with 1 having the highest specificity and 4 having the lowest specificity. Each strand of the siRNA is assigned to a specificity category.

[0321] Species cross-reactivity was assessed for human, cynomolgus monkey, rhesus monkey, mouse and rat. The analysis was based on a canonical siRNA design using 19 bases and 17 bases (without considering positions 1 and 19) for cross-reactivity. Full match as well as single mismatch analyses were included.

[0322] Analysis of the human Single Nucleotide Polymorphism (SNP) database (NCBI-DB-SNP) to identify siRNAs targeting regions with known SNPs was also carried out to identify siRNAs that may be non-functional in individuals containing the SNP. Information regarding the positions of SNPs within the target sequence as well as minor allele frequency (MAF) in case data was obtained in this analysis.

[0323] Initial analysis of the relevant ANGPTL4 mRNA sequence revealed few sequences that fulfil the specificity parameters and at the same time target ANGPTL4 mRNA in all of the analyzed relevant species. Therefore, it was decided to design independent screening subsets for the therapeutic siRNAs.

[0324] The siRNAs in these subsets recognize the human ANGPTL4 sequence, as a human cell culture system is selected for determination of in vitro activity. Therefore, the siRNAs in these subsets can be used to target human ANGPTL4 in a therapeutic setting.

[0325] The number of siRNAs that were derived from human ANGPTL4 mRNA (NM_139314.3) without consideration of specificity or species cross-reactivity was 1,854 (antisense and sense strand sequences included in SEQ ID NOS: 1-3708).

[0326] Prioritizing sequences for target specificity, species cross-reactivity, miRNA seed region sequences and SNPs as described above yields subset A. The siRNAs in subset A are included in Table 4.

TABLE 4
Subset A

| | Sense Strand | Antisense Strand |
|---|---|---|
| | Sequence | Sequence |
| siRNA Name | SEQ ID NO: | SEQ ID NO: |
| siRNA 32 | 32 | 1886 |
| siRNA 33 | 33 | 1887 |
| siRNA 34 | 34 | 1888 |
| siRNA 35 | 35 | 1889 |
| siRNA 36 | 36 | 1890 |
| siRNA 56 | 56 | 1910 |
| siRNA 57 | 57 | 1911 |
| siRNA 58 | 58 | 1912 |
| siRNA 59 | 59 | 1913 |
| siRNA 61 | 61 | 1915 |
| siRNA 62 | 62 | 1916 |
| siRNA 63 | 63 | 1917 |
| siRNA 64 | 64 | 1918 |
| siRNA 79 | 79 | 1933 |
| siRNA 80 | 80 | 1934 |
| siRNA 84 | 84 | 1938 |
| siRNA 111 | 111 | 1965 |
| siRNA 112 | 112 | 1966 |
| siRNA 116 | 116 | 1970 |
| siRNA 117 | 117 | 1971 |
| siRNA 118 | 118 | 1972 |
| siRNA 119 | 119 | 1973 |
| siRNA 120 | 120 | 1974 |
| siRNA 121 | 121 | 1975 |
| siRNA 125 | 125 | 1979 |
| siRNA 126 | 126 | 1980 |
| siRNA 127 | 127 | 1981 |
| siRNA 128 | 128 | 1982 |
| siRNA 129 | 129 | 1983 |
| siRNA 149 | 149 | 2003 |
| siRNA 150 | 150 | 2004 |
| siRNA 152 | 152 | 2006 |
| siRNA 153 | 153 | 2007 |
| siRNA 154 | 154 | 2008 |
| siRNA 157 | 157 | 2011 |
| siRNA 158 | 158 | 2012 |
| siRNA 159 | 159 | 2013 |
| siRNA 161 | 161 | 2015 |
| siRNA 164 | 164 | 2018 |
| siRNA 165 | 165 | 2019 |
| siRNA 166 | 166 | 2020 |
| siRNA 167 | 167 | 2021 |
| siRNA 168 | 168 | 2022 |
| siRNA 169 | 169 | 2023 |
| siRNA 172 | 172 | 2026 |
| siRNA 174 | 174 | 2028 |
| siRNA 175 | 175 | 2029 |
| siRNA 177 | 177 | 2031 |
| siRNA 196 | 196 | 2050 |
| siRNA 198 | 198 | 2052 |
| siRNA 199 | 199 | 2053 |
| siRNA 210 | 210 | 2064 |
| siRNA 211 | 211 | 2065 |
| siRNA 212 | 212 | 2066 |
| siRNA 214 | 214 | 2068 |
| siRNA 215 | 215 | 2069 |
| siRNA 216 | 216 | 2070 |
| siRNA 217 | 217 | 2071 |
| siRNA 218 | 218 | 2072 |
| siRNA 219 | 219 | 2073 |
| siRNA 221 | 221 | 2075 |
| siRNA 222 | 222 | 2076 |
| siRNA 223 | 223 | 2077 |
| siRNA 228 | 228 | 2082 |
| siRNA 230 | 230 | 2084 |
| siRNA 231 | 231 | 2085 |
| siRNA 240 | 240 | 2094 |
| siRNA 241 | 241 | 2095 |
| siRNA 245 | 245 | 2099 |
| siRNA 246 | 246 | 2100 |
| siRNA 250 | 250 | 2104 |
| siRNA 252 | 252 | 2106 |
| siRNA 253 | 253 | 2107 |
| siRNA 254 | 254 | 2108 |
| siRNA 255 | 255 | 2109 |
| siRNA 260 | 260 | 2114 |
| siRNA 261 | 261 | 2115 |
| siRNA 262 | 262 | 2116 |
| siRNA 263 | 263 | 2117 |
| siRNA 265 | 265 | 2119 |
| siRNA 266 | 266 | 2120 |
| siRNA 271 | 271 | 2125 |
| siRNA 272 | 272 | 2126 |
| siRNA 274 | 274 | 2128 |
| siRNA 280 | 280 | 2134 |
| siRNA 282 | 282 | 2136 |
| siRNA 289 | 289 | 2143 |
| siRNA 290 | 290 | 2144 |
| siRNA 291 | 291 | 2145 |
| siRNA 292 | 292 | 2146 |
| siRNA 293 | 293 | 2147 |
| siRNA 299 | 299 | 2153 |
| siRNA 304 | 304 | 2158 |
| siRNA 321 | 321 | 2175 |
| siRNA 323 | 323 | 2177 |
| siRNA 325 | 325 | 2179 |
| siRNA 326 | 326 | 2180 |
| siRNA 328 | 328 | 2182 |
| siRNA 329 | 329 | 2183 |
| siRNA 330 | 330 | 2184 |
| siRNA 331 | 331 | 2185 |
| siRNA 332 | 332 | 2186 |
| siRNA 333 | 333 | 2187 |
| siRNA 334 | 334 | 2188 |
| siRNA 335 | 335 | 2189 |
| siRNA 337 | 337 | 2191 |
| siRNA 338 | 338 | 2192 |
| siRNA 339 | 339 | 2193 |
| siRNA 342 | 342 | 2196 |
| siRNA 347 | 347 | 2201 |
| siRNA 349 | 349 | 2203 |
| siRNA 350 | 350 | 2204 |
| siRNA 352 | 352 | 2206 |
| siRNA 353 | 353 | 2207 |
| siRNA 356 | 356 | 2210 |
| siRNA 377 | 377 | 2231 |
| siRNA 380 | 380 | 2234 |
| siRNA 382 | 382 | 2236 |
| siRNA 386 | 386 | 2240 |
| siRNA 388 | 388 | 2242 |
| siRNA 391 | 391 | 2245 |
| siRNA 392 | 392 | 2246 |
| siRNA 393 | 393 | 2247 |
| siRNA 394 | 394 | 2248 |
| siRNA 397 | 397 | 2251 |
| siRNA 398 | 398 | 2252 |
| siRNA 399 | 399 | 2253 |
| siRNA 402 | 402 | 2256 |
| siRNA 404 | 404 | 2258 |
| siRNA 405 | 405 | 2259 |
| siRNA 411 | 411 | 2265 |
| siRNA 412 | 412 | 2266 |
| siRNA 413 | 413 | 2267 |
| siRNA 414 | 414 | 2268 |
| siRNA 415 | 415 | 2269 |
| siRNA 417 | 417 | 2271 |
| siRNA 419 | 419 | 2273 |
| siRNA 420 | 420 | 2274 |
| siRNA 421 | 421 | 2275 |
| siRNA 422 | 422 | 2276 |
| siRNA 423 | 423 | 2277 |
| siRNA 424 | 424 | 2278 |
| siRNA 425 | 425 | 2279 |
| siRNA 426 | 426 | 2280 |
| siRNA 427 | 427 | 2281 |
| siRNA 428 | 428 | 2282 |
| siRNA 429 | 429 | 2283 |
| siRNA 430 | 430 | 2284 |
| siRNA 431 | 431 | 2285 |
| siRNA 435 | 435 | 2289 |
| siRNA 481 | 481 | 2335 |
| siRNA 484 | 484 | 2338 |
| siRNA 506 | 506 | 2360 |
| siRNA 509 | 509 | 2363 |
| siRNA 517 | 517 | 2371 |
| siRNA 519 | 519 | 2373 |
| siRNA 520 | 520 | 2374 |
| siRNA 565 | 565 | 2419 |
| siRNA 570 | 570 | 2424 |
| siRNA 571 | 571 | 2425 |
| siRNA 572 | 572 | 2426 |
| siRNA 589 | 589 | 2443 |
| siRNA 607 | 607 | 2461 |
| siRNA 608 | 608 | 2462 |
| siRNA 610 | 610 | 2464 |
| siRNA 611 | 611 | 2465 |
| siRNA 612 | 612 | 2466 |
| siRNA 616 | 616 | 2470 |
| siRNA 617 | 617 | 2471 |
| siRNA 620 | 620 | 2474 |
| siRNA 623 | 623 | 2477 |
| siRNA 635 | 635 | 2489 |
| siRNA 637 | 637 | 2491 |
| siRNA 640 | 640 | 2494 |
| siRNA 643 | 643 | 2497 |
| siRNA 653 | 653 | 2507 |
| siRNA 672 | 672 | 2526 |
| siRNA 673 | 673 | 2527 |
| siRNA 674 | 674 | 2528 |
| siRNA 675 | 675 | 2529 |
| siRNA 676 | 676 | 2530 |
| siRNA 677 | 677 | 2531 |
| siRNA 678 | 678 | 2532 |
| siRNA 679 | 679 | 2533 |
| siRNA 681 | 681 | 2535 |
| siRNA 682 | 682 | 2536 |
| siRNA 683 | 683 | 2537 |
| siRNA 684 | 684 | 2538 |
| siRNA 686 | 686 | 2540 |
| siRNA 687 | 687 | 2541 |
| siRNA 689 | 689 | 2543 |
| siRNA 692 | 692 | 2546 |
| siRNA 695 | 695 | 2549 |
| siRNA 830 | 830 | 2684 |
| siRNA 834 | 834 | 2688 |
| siRNA 841 | 841 | 2695 |
| siRNA 842 | 842 | 2696 |
| siRNA 843 | 843 | 2697 |
| siRNA 844 | 844 | 2698 |
| siRNA 850 | 850 | 2704 |
| siRNA 851 | 851 | 2705 |
| siRNA 852 | 852 | 2706 |
| siRNA 853 | 853 | 2707 |
| siRNA 854 | 854 | 2708 |
| siRNA 856 | 856 | 2710 |
| siRNA 857 | 857 | 2711 |
| siRNA 859 | 859 | 2713 |
| siRNA 866 | 866 | 2720 |
| siRNA 868 | 868 | 2722 |
| siRNA 871 | 871 | 2725 |
| siRNA 872 | 872 | 2726 |
| siRNA 876 | 876 | 2730 |
| siRNA 887 | 887 | 2741 |
| siRNA 888 | 888 | 2742 |
| siRNA 890 | 890 | 2744 |
| siRNA 892 | 892 | 2746 |
| siRNA 893 | 893 | 2747 |
| siRNA 894 | 894 | 2748 |
| siRNA 897 | 897 | 2751 |
| siRNA 900 | 900 | 2754 |
| siRNA 902 | 902 | 2756 |
| siRNA 907 | 907 | 2761 |
| siRNA 911 | 911 | 2765 |
| siRNA 912 | 912 | 2766 |
| siRNA 913 | 913 | 2767 |
| siRNA 914 | 914 | 2768 |
| siRNA 915 | 915 | 2769 |
| siRNA 916 | 916 | 2770 |
| siRNA 917 | 917 | 2771 |
| siRNA 918 | 918 | 2772 |
| siRNA 919 | 919 | 2773 |
| siRNA 920 | 920 | 2774 |
| siRNA 921 | 921 | 2775 |
| siRNA 922 | 922 | 2776 |
| siRNA 925 | 925 | 2779 |
| siRNA 945 | 945 | 2799 |
| siRNA 968 | 968 | 2822 |
| siRNA 1001 | 1001 | 2855 |
| siRNA 1002 | 1002 | 2856 |
| siRNA 1005 | 1005 | 2859 |
| siRNA 1006 | 1006 | 2860 |
| siRNA 1009 | 1009 | 2863 |
| siRNA 1010 | 1010 | 2864 |
| siRNA 1011 | 1011 | 2865 |
| siRNA 1013 | 1013 | 2867 |
| siRNA 1028 | 1028 | 2882 |
| siRNA 1032 | 1032 | 2886 |
| siRNA 1037 | 1037 | 2891 |
| siRNA 1052 | 1052 | 2906 |
| siRNA 1053 | 1053 | 2907 |
| siRNA 1054 | 1054 | 2908 |
| siRNA 1055 | 1055 | 2909 |
| siRNA 1057 | 1057 | 2911 |
| siRNA 1058 | 1058 | 2912 |
| siRNA 1064 | 1064 | 2918 |
| siRNA 1112 | 1112 | 2966 |
| siRNA 1122 | 1122 | 2976 |
| siRNA 1124 | 1124 | 2978 |
| siRNA 1126 | 1126 | 2980 |
| siRNA 1127 | 1127 | 2981 |
| siRNA 1133 | 1133 | 2987 |
| siRNA 1134 | 1134 | 2988 |
| siRNA 1136 | 1136 | 2990 |
| siRNA 1137 | 1137 | 2991 |
| siRNA 1147 | 1147 | 3001 |
| siRNA 1148 | 1148 | 3002 |
| siRNA 1149 | 1149 | 3003 |
| siRNA 1151 | 1151 | 3005 |
| siRNA 1153 | 1153 | 3007 |
| siRNA 1154 | 1154 | 3008 |
| siRNA 1155 | 1155 | 3009 |
| siRNA 1157 | 1157 | 3011 |
| siRNA 1158 | 1158 | 3012 |
| siRNA 1161 | 1161 | 3015 |
| siRNA 1162 | 1162 | 3016 |
| siRNA 1163 | 1163 | 3017 |
| siRNA 1164 | 1164 | 3018 |
| siRNA 1165 | 1165 | 3019 |
| siRNA 1166 | 1166 | 3020 |
| siRNA 1171 | 1171 | 3025 |
| siRNA 1172 | 1172 | 3026 |
| siRNA 1175 | 1175 | 3029 |
| siRNA 1181 | 1181 | 3035 |
| siRNA 1182 | 1182 | 3036 |
| siRNA 1184 | 1184 | 3038 |
| siRNA 1248 | 1248 | 3102 |
| siRNA 1249 | 1249 | 3103 |
| siRNA 1252 | 1252 | 3106 |
| siRNA 1253 | 1253 | 3107 |
| siRNA 1259 | 1259 | 3113 |
| siRNA 1276 | 1276 | 3130 |
| siRNA 1285 | 1285 | 3139 |
| siRNA 1310 | 1310 | 3164 |
| siRNA 1315 | 1315 | 3169 |
| siRNA 1338 | 1338 | 3192 |
| siRNA 1343 | 1343 | 3197 |
| siRNA 1347 | 1347 | 3201 |
| siRNA 1348 | 1348 | 3202 |
| siRNA 1349 | 1349 | 3203 |
| siRNA 1350 | 1350 | 3204 |
| siRNA 1351 | 1351 | 3205 |
| siRNA 1352 | 1352 | 3206 |
| siRNA 1378 | 1378 | 3232 |
| siRNA 1405 | 1405 | 3259 |
| siRNA 1407 | 1407 | 3261 |
| siRNA 1413 | 1413 | 3267 |
| siRNA 1414 | 1414 | 3268 |
| siRNA 1415 | 1415 | 3269 |
| siRNA 1416 | 1416 | 3270 |
| siRNA 1417 | 1417 | 3271 |
| siRNA 1418 | 1418 | 3272 |
| siRNA 1429 | 1429 | 3283 |
| siRNA 1430 | 1430 | 3284 |
| siRNA 1448 | 1448 | 3302 |
| siRNA 1477 | 1477 | 3331 |
| siRNA 1487 | 1487 | 3341 |
| siRNA 1488 | 1488 | 3342 |
| siRNA 1489 | 1489 | 3343 |
| siRNA 1493 | 1493 | 3347 |
| siRNA 1494 | 1494 | 3348 |
| siRNA 1519 | 1519 | 3373 |
| siRNA 1523 | 1523 | 3377 |
| siRNA 1538 | 1538 | 3392 |
| siRNA 1556 | 1556 | 3410 |
| siRNA 1561 | 1561 | 3415 |
| siRNA 1563 | 1563 | 3417 |
| siRNA 1564 | 1564 | 3418 |
| siRNA 1565 | 1565 | 3419 |
| siRNA 1570 | 1570 | 3424 |
| siRNA 1571 | 1571 | 3425 |
| siRNA 1572 | 1572 | 3426 |
| siRNA 1580 | 1580 | 3434 |
| siRNA 1581 | 1581 | 3435 |
| siRNA 1589 | 1589 | 3443 |
| siRNA 1597 | 1597 | 3451 |
| siRNA 1598 | 1598 | 3452 |
| siRNA 1601 | 1601 | 3455 |
| siRNA 1602 | 1602 | 3456 |
| siRNA 1603 | 1603 | 3457 |
| siRNA 1604 | 1604 | 3458 |
| siRNA 1605 | 1605 | 3459 |
| siRNA 1606 | 1606 | 3460 |
| siRNA 1610 | 1610 | 3464 |
| siRNA 1611 | 1611 | 3465 |
| siRNA 1613 | 1613 | 3467 |
| siRNA 1614 | 1614 | 3468 |
| siRNA 1617 | 1617 | 3471 |
| siRNA 1693 | 1693 | 3547 |
| siRNA 1699 | 1699 | 3553 |
| siRNA 1701 | 1701 | 3555 |
| siRNA 1702 | 1702 | 3556 |
| siRNA 1703 | 1703 | 3557 |
| siRNA 1722 | 1722 | 3576 |
| siRNA 1740 | 1740 | 3594 |
| siRNA 1741 | 1741 | 3595 |
| siRNA 1742 | 1742 | 3596 |
| siRNA 1745 | 1745 | 3599 |
| siRNA 1747 | 1747 | 3601 |
| siRNA 1748 | 1748 | 3602 |
| siRNA 1749 | 1749 | 3603 |
| siRNA 1751 | 1751 | 3605 |
| siRNA 1754 | 1754 | 3608 |
| siRNA 1755 | 1755 | 3609 |
| siRNA 1779 | 1779 | 3633 |
| siRNA 1780 | 1780 | 3634 |
| siRNA 1784 | 1784 | 3638 |
| siRNA 1787 | 1787 | 3641 |
| siRNA 1788 | 1788 | 3642 |
| siRNA 1798 | 1798 | 3652 |
| siRNA 1799 | 1799 | 3653 |
| siRNA 1800 | 1800 | 3654 |
| siRNA 1801 | 1801 | 3655 |
| siRNA 1802 | 1802 | 3656 |
| siRNA 1803 | 1803 | 3657 |

[0327] Subset A includes 102 siRNA sequences that are cross-reactive with NHP ANGPTL4 mRNA (siRNAs 33, 34, 35, 36, 56, 121, 272, 280, 282, 289, 290, 291, 292, 293, 321, 323, 326, 328, 329, 330, 331, 332, 333, 334, 335, 337, 338, 339, 342, 347, 349, 411, 412, 430, 431, 435, 481, 484, 509, 517, 519, 520, 565, 620, 635, 637, 640, 830, 834, 841, 842, 843, 844, 850, 871, 872, 876, 887, 888, 894, 897, 902, 945, 1001, 1002, 1005, 1037, 1133, 1134, 1137, 1149, 1151, 1153, 1154, 1155, 1157, 1158, 1161, 1162, 1164, 1165, 1166, 1171, 1172, 1248, 1249, 1315, 1338, 1343, 1347, 1348, 1429, 1430, 1570, 1571, 1572, 1610, 1611, 1617, 1780, 1784, and 1787). The siRNAs in subset A that may be cross-reactive with NHP ANGPTL4 mRNA were tested in vitro (see, e.g., Table 5). The sense strand of any of these siRNAs may include any one of modification patterns 1S-9S. The antisense strand of any of these siRNAs may include any one of modification patterns 1AS-11AS.

[0328] The siRNAs in subset A have the following characteristics:
[0329] Cross-reactivity: With 19mer in human ANGPTL4 mRNA, with 17mer/19mer in NHP ANGPTL4
[0330] Specificity category: For human and NHP: AS2 or better, SS3 or better
[0331] miRNA seeds: AS+SS strand: seed region not conserved in human, mouse, and rat and not present in >4 species
[0332] Off-target frequency: ≤20 human off-targets matched with 2 mismatches in antisense strand
[0333] SNPs: siRNA target sites do not harbor SNPs with a MAF≥1% (pos. 2-18)

[0334] The siRNA sequences in subset A were selected for more stringent specificity to yield subset B. Subset B includes 323 siRNAs (siRNAs 32, 33, 34, 35, 36, 56, 57, 58, 59, 61, 62, 63, 64, 79, 80, 112, 116, 117, 118, 119, 120, 125, 126, 127, 128, 129, 149, 150, 152, 153, 157, 158, 159, 161, 164, 165, 166, 167, 168, 169, 172, 174, 175, 196, 199, 211, 212, 214, 215, 216, 217, 218, 219, 221, 222, 223, 228, 230, 231, 240, 241, 245, 246, 250, 252, 253, 254, 255, 260, 261, 262, 263, 265, 266, 271, 272, 274, 280, 289, 290, 291, 292, 293, 299, 304, 321, 323, 325, 326, 328, 329, 330, 331, 332, 333, 334, 335, 337, 338, 339, 342, 347, 349, 350, 352, 353, 356, 380, 382, 386, 388, 391, 392, 393, 394, 397, 398, 399, 402, 404, 405, 411, 412, 413, 414, 415, 420, 421, 422, 423, 424, 425, 426, 427, 428, 429, 430, 431, 435, 484, 517, 519, 520, 565, 570, 571, 572, 607, 608, 610, 611, 612, 616, 617, 620, 635, 637, 640, 672, 673, 674, 675, 676, 677, 678, 679, 681, 682, 683, 684, 686, 687, 689, 692, 695, 830, 841, 842, 843, 844, 850, 851, 852, 853, 854, 856, 857, 866, 868, 871, 872, 876, 887, 888, 890, 892, 893, 894, 902, 911, 912, 913, 914, 915, 916, 917, 918, 919, 920, 921, 922, 945, 1001, 1002, 1005, 1006, 1009, 1010, 1011, 1013, 1028, 1032, 1052, 1053, 1054, 1055, 1057, 1058, 1112, 1122, 1124, 1126, 1127, 1133, 1134, 1147, 1148, 1149, 1151, 1153, 1154, 1155, 1157, 1158, 1161, 1162, 1164, 1165, 1166, 1175, 1182, 1184, 1252, 1253, 1259, 1276, 1285, 1310, 1315, 1343, 1347, 1348, 1349, 1350, 1351, 1405, 1407, 1413, 1414, 1415, 1416, 1417, 1418, 1429, 1430, 1448, 1519, 1523, 1556, 1561, 1563, 1564, 1565, 1571, 1572, 1580, 1581, 1589, 1597, 1601, 1602, 1603, 1604, 1605, 1606, 1611, 1613, 1614, 1693, 1699, 1701, 1702, 1703, 1722, 1740, 1741, 1742, 1745, 1747, 1748, 1749, 1751, 1754, 1755, 1779, 1780, 1784, 1788, 1798, 1799, 1801, 1802, and 1803). This subset includes 85 siRNA sequences that are cross-reactive with NHP ANGPTL4 mRNA (siRNAs 33, 34, 35, 36, 56, 272, 280, 289, 290, 291, 292, 293, 321, 323, 326, 328, 329, 330, 331, 332, 333, 334, 335, 337, 338, 339, 342, 347, 349, 411, 412, 430, 431, 435, 484, 517, 519, 520, 565, 620, 635, 637, 640, 830, 841, 842, 843, 844, 850, 871, 872, 876, 887, 888, 894, 902, 945, 1001, 1002, 1005, 1133, 1134, 1149, 1151, 1153, 1154, 1155, 1157, 1158, 1161, 1162, 1164, 1165, 1166, 1315, 1343, 1347, 1348, 1429, 1430, 1571, 1572, 1611, 1780, and 1784).

[0335] The siRNAs in subset B have the following characteristics:
[0336] Cross-reactivity: With 19mer in human ANGPTL4 mRNA, with 17mer/19mer in NHP ANGPTL4
[0337] Specificity category: For human and NHP: AS2 or better, SS3 or better
[0338] miRNA seeds: AS+SS strand: seed region not conserved in human, mouse, and rat and not present in >4 species
[0339] Off-target frequency: ≤15 human off-targets matched with 2 mismatches in antisense strand
[0340] SNPs: siRNA target sites do not harbor SNPs with a MAF≥1% (pos. 2-18)

[0341] The siRNA sequences in subset B were further selected for absence of seed regions in the AS strand that are identical to a seed region of known human miRNA to yield subset C. Subset C includes 183 siRNAs (siRNAs 32, 36, 56, 57, 58, 61, 62, 79, 80, 117, 119, 125, 126, 128, 149, 152, 157, 158, 159, 161, 165, 166, 167, 168, 169, 174, 196, 211, 212, 217, 218, 219, 230, 231, 245, 246, 253, 260, 261, 262, 271, 272, 280, 289, 291, 292, 293, 304, 321, 323, 325, 326, 328, 330, 331, 332, 333, 334, 337, 338, 342, 347, 349, 352, 353, 356, 380, 382, 386, 388, 391, 392, 394, 399, 413, 414, 415, 422, 423, 424, 425, 426, 435, 517, 519, 520, 565, 571, 607, 608, 612, 617, 620, 635, 640, 672, 673, 674, 675, 678, 679, 681, 683, 684, 687, 692, 842, 843, 850, 851, 854, 866, 868, 876, 892, 893, 902, 911, 912, 913, 914, 916, 919, 945, 1001, 1002, 1006, 1010, 1028, 1052, 1053, 1054, 1055, 1057, 1112, 1124, 1127, 1147, 1149, 1151, 1153, 1155, 1157, 1164, 1175, 1182, 1184, 1259, 1276, 1285, 1315, 1343, 1349, 1350, 1351, 1405, 1407, 1413, 1415, 1418, 1564, 1571, 1581, 1589, 1597, 1601, 1602, 1603, 1604, 1605, 1606, 1613, 1614, 1693, 1701, 1722, 1740, 1745, 1751, 1755, 1801, 1802, and 1803). This subset includes 47 siRNA sequences that are cross-reactive with NHP ANGPTL4 mRNA (siRNAs 36, 56, 272, 280, 289, 291, 292, 293, 321, 323, 326, 328, 330, 331, 332, 333, 334, 337, 338, 342, 347, 349, 435, 517, 519, 520, 565, 620, 635, 640, 842, 843, 850, 876, 902, 945, 1001, 1002, 1149, 1151, 1153, 1155, 1157, 1164, 1315, 1343, and 1571).

[0342] The siRNAs in subset C have the following characteristics:
[0343] Cross-reactivity: With 19mer in human ANGPTL4 mRNA, with 17mer/19mer in NHP ANGPTL4
[0344] Specificity category: For human and NHP: AS2 or better, SS3 or better
[0345] miRNA seeds: AS+SS strand: seed region not conserved in human, mouse, and rat and not present in >4 species. AS strand: seed region not identical to seed region of known human miRNA
[0346] Off-target frequency: ≤15 human off-targets matched with 2 mismatches by antisense strand
[0347] SNPs: siRNA target sites do not harbor SNPs with a MAF≥1% (pos. 2-18)

[0348] The siRNA sequences in subset C were also selected for absence of seed regions in the AS or S strands that are identical to a seed region of known human miRNA to yield subset D. Subset D includes 114 siRNAs (siRNAs 32, 36, 56, 58, 61, 62, 80, 117, 119, 126, 152, 154, 157, 158, 159, 161, 166, 169, 174, 177, 196, 211, 212, 217, 218, 230, 231, 245, 253, 260, 261, 271, 272, 280, 289, 293, 304, 328, 330, 331, 332, 333, 334, 337, 342, 347, 349, 353, 356, 386, 388, 391, 392, 394, 414, 415, 422, 423, 424, 426, 435, 520, 571, 608, 612, 617, 653, 672, 678, 679, 681, 683, 692, 842, 843, 851, 854, 859, 876, 892, 900, 913, 914, 919, 968, 1001, 1002, 1054, 1057, 1064, 1112, 1124, 1157, 1164, 1182, 1184, 1248, 1259, 1343, 1351, 1352, 1415, 1418, 1564, 1581, 1602, 1614, 1693, 1701, 1722, 1740, 1751, 1755, and 1787). This subset includes 26 siRNA sequences that are cross-reactive with NHP ANGPTL4 mRNA (siRNAs 36, 56, 272, 280, 289, 293, 328, 330, 331, 332, 333, 334, 337, 342, 347, 349, 435, 520, 842, 843, 876, 1001, 1002, 1157, 1164, and 1343).

[0349] The siRNAs in subset D have the following characteristics:
[0350] Cross-reactivity: With 19mer in human ANGPTL4 mRNA, with 17mer/19mer in NHP ANGPTL4
[0351] Specificity category: For human and NHP: AS2 or better, SS3 or better
[0352] miRNA seeds: AS+SS strand: seed region not conserved in human, mouse, and rat and not present in >4 species. AS+SS strand: seed region not identical to seed region of known human miRNA
[0353] Off-target frequency: ≤20 human off-targets matched with 2 mismatches by antisense strand
[0354] SNPs: siRNA target sites do not harbor SNPs with a MAF≥1% (pos. 2-18)

[0355] The siRNA sequences in subset D were further selected for more stringent specificity to yield subset E. Subset E includes 104 siRNAs (siRNAs 32, 36, 56, 58, 61, 62, 80, 117, 119, 126, 152, 157, 158, 159, 161, 166, 169, 174, 196, 211, 212, 217, 218, 230, 231, 245, 253, 260, 261, 271, 272, 280, 289, 293, 304, 328, 330, 331, 332, 333, 334, 337, 342, 347, 349, 353, 356, 386, 388, 391, 392, 394, 414, 415, 422, 423, 424, 426, 435, 520, 571, 608, 612, 617, 672, 678, 679, 681, 683, 692, 842, 843, 851, 854, 876, 892, 913, 914, 919, 1001, 1002, 1054, 1057, 1112, 1124, 1157, 1164, 1182, 1184, 1259, 1343, 1351, 1415, 1418, 1564, 1581, 1602, 1614, 1693, 1701, 1722, 1740, 1751, and 1755). This set includes 26 siRNA sequences that are cross-reactive with NHP ANGPTL4 mRNA (siRNAs 36, 56, 272, 280, 289, 293, 328, 330, 331, 332, 333, 334, 337, 342, 347, 349, 435, 520, 842, 843, 876, 1001, 1002, 1157, 1164, and 1343).

[0356] The siRNAs in subset E have the following characteristics:
[0357] Cross-reactivity: With 19mer in human ANGPTL4 mRNA, with 17mer/19mer in NHP ANGPTL4
[0358] Specificity category: For human and NHP: AS2 or better, SS3 or better
[0359] miRNA seeds: AS+SS strand: seed region not conserved in human, mouse, and rat and not present in >4 species. AS+SS strand: seed region not identical to seed region of known human miRNA
[0360] Off-target frequency: ≤15 human off-targets matched with 2 mismatches by antisense strand
[0361] SNPs: siRNA target sites do not harbor SNPs with a MAF≥1% (pos. 2-18)

[0362] The siRNA sequences targeting ANGPTL4 can also be selected using other criteria. Subset F includes 115 siRNAs (siRNAs 32, 57, 119, 120, 125, 126, 127, 128, 164, 165, 166, 167, 168, 169, 174, 175, 176, 177, 199, 250, 252, 255, 260, 261, 262, 263, 353, 356, 363, 372, 403, 404, 412, 413, 417, 423, 424, 425, 426, 427, 428, 429, 565, 570, 571, 572, 589, 607, 608, 610, 611, 612, 672, 673, 674, 675, 676, 677, 678, 679, 689, 695, 759, 801, 851, 852, 853, 854, 857, 859, 866, 868, 907, 911, 912, 913, 914, 915, 918, 919, 972, 1006, 1009, 1010, 1011, 1013, 1028, 1034, 1037, 1048, 1126, 1276, 1285, 1349, 1489, 1490, 1564, 1565, 1580, 1581, 1589, 1597, 1598, 1601, 1602, 1603, 1604, 1605, 1606, 1610, 1701, 1702, 1789, 1840, and 1842).

[0363] The siRNAs in subset F met the following criteria:
[0364] Cross-reactivity: With 19mer in human ANGPTL4 mRNA. One or fewer mismatches with 19mer in either rhesus or cynomolgus monkey.
[0365] Specificity category: For human: AS2 or better, SS3 or better. For NHP: AS3 or better, SS3 or better
[0366] miRNA seeds: AS+SS strand: seed region conserved in <4 species (out of 7). AS and SS strand: seed region not conserved between human, mouse and rat
[0367] Off-target frequency: For human: no perfect match or single mismatches. For NHP: no perfect match
[0368] SNPs: siRNA target sites do not harbor SNPs with a MAF≥1% (pos. 2-18)

[0369] Subset G includes 20 siRNAs (siRNAs 32, 570, 571, 572, 589, 607, 759, 801, 1276, 1285, 1489, 1490, 1564, 1580, 1581, 1589, 1597, 1702, 1840, and 1842). The siRNAs in subset G include siRNAs from subset F that were tested in vitro (see, e.g., Table 6). In some cases, the sense strand of any of the siRNAs of subset G comprises modification pattern 2S. In some cases, the antisense strand of any of the siRNAs of subset G comprises modification pattern 3AS. The siRNAs in subset G may comprise any other modification pattern(s) (e.g. any of modification patterns 1S-9S, or 1AS-11AS).

[0370] Any siRNA among any of subsets A-G may comprise any modification pattern described herein. If a sequence is a different number of nucleotides in length than a modification pattern, the modification pattern may still be used with the appropriate number of additional nucleotides added 5′ or 3′ to match the number of nucleotides in the modification pattern. For example, if a sense or antisense strand of the siRNA among any of subsets A-G comprises 19 nucleotides, and a modification pattern comprises 21 nucleotides, UU may be added onto the 5′ end of the sense or antisense strand.

### Example 3: Chemically Modified ANGPTL4 siRNAs

[0371] The siRNAs targeting ANGPTL4 can be synthesized with chemical modifications with the sense strand having modification pattern 1S (SEQ ID NO: 13954) and the antisense strand having modification pattern 1AS (SEQ ID NO: 13960). In addition, adenosine can be placed at position 19 in the sense strand and uridine at position 1 in the antisense strand. The sense strand or antisense strand may have a GalNAc moiety attached to it.

[0372] The siRNAs targeting ANGPTL4 can also be synthesized with chemical modifications with the sense strand having modification pattern 2S (SEQ ID NO: 13955) and the antisense strand having modification pattern 3AS (SEQ ID NO: 13962). In addition, adenosine can be placed at position 19 in the sense strand and uridine at position 1 in the antisense strand. The sense strand or antisense strand may have a GalNAc moiety attached to it.

[0373] The siRNAs targeting ANGPTL4 can also be synthesized with chemical modifications with the sense strand having modification pattern 2S (SEQ ID NO: 13955) and the antisense strand having modification pattern 9AS (SEQ ID NO: 13968). In addition, adenosine can be placed at position 19 in the sense strand and uridine at position 1 in the antisense strand. The sense strand or antisense strand may have a GalNAc moiety attached to it.

[0374] The siRNAs targeting ANGPTL4 can also be synthesized with chemical modifications with the sense strand having modification pattern 3S (SEQ ID NO: 13954) and the antisense strand having modification pattern 3AS (SEQ ID NO: 13962). In addition, adenosine can be placed at position 19 in the sense strand and uridine at position 1 in the antisense strand. The sense strand or antisense strand may have a GalNAc moiety attached to it.

[0375] The siRNAs targeting ANGPTL4 can also be synthesized with chemical modifications with the sense strand having modification pattern 6S (SEQ ID NO: 13959) and the antisense strand having modification pattern 6AS (SEQ ID NO: 13965). In addition, adenosine can be placed at position 19 in the sense strand and uridine at position 1 in the antisense strand. The sense strand or antisense strand may have a GalNAc moiety attached to it.

[0376] The siRNAs targeting ANGPTL4 can also be synthesized with chemical modifications with the sense strand having modification pattern 6S (SEQ ID NO: 13959) and the antisense strand having modification pattern 8AS (SEQ ID NO: 13967). In addition, adenosine can be placed at position 19 in the sense strand and uridine at position 1 in the antisense strand. The sense strand or antisense strand may have a GalNAc moiety attached to it.

[0377] Some examples include modification pattern 7S, 8S, or 9S. Some examples include modification pattern 10AS or 11AS). The sense strand or antisense strand that includes any of these modification patterns may have a GalNAc moiety attached to it.

### Example 4: Screening ANGPTL4 siRNAs for Activity in Cells in Culture

[0378] Chemically modified ANGPTL4 siRNAs cross reactive for human and non-human primate were assayed for ANGPTL4 mRNA knockdown activity in cells in culture. U-138 MG (ATCC® HTB-16) cells were seeded in 96-well tissue culture plates at a cell density of 7,500 cells per well in EMEM (BD Biosciences Catalog No. 670086) supplemented with 10% fetal bovine serum and incubated overnight in a water-jacketed, humidified incubator at 37° C. in an atmosphere composed of air plus 5% carbon dioxide. The ANGPTL4 siRNAs were individually transfected into U-138 MG cells in duplicate wells at 10 nM final concentration using 0.3 μL Lipofectamine RNAiMax (Fisher) per well. Silencer Select Negative Control #1 (ThermoFisher, Catalog #4390843) was transfected at 10 nM final concentration as a control. After incubation for 48 hours at 37° C., total RNA was harvested from each well and cDNA prepared using TaqMan® Fast Advanced Cells-to-CT™ Kit (ThermoFisher, Catalog #A35374) according to the manufacturer's instructions. The level of ANGPTL4 mRNA from each well was measured in triplicate by real-time qPCR on an Applied Biosystems 7500 Fast Real-Time PCR machine using TaqMan Gene Expression Assay for human ANGPTL4 (ThermoFisher, assay #Hs01101127 ml). The level of PPIA mRNA was measured using TaqMan Gene Expression Assay (ThermoFisher, assay #Hs99999904_m1) and used to determine relative ANGPTL4 mRNA levels in each well using the delta-delta Ct method. All data were normalized to relative ANGPTL4 mRNA levels in untreated U-138 MG cells. A subset of the siRNAs were also tested at 1 nM concentration. Results are shown in Table 5 and Table 6. The siRNAs in Table 5 (ETD00646-ETD00747) each comprised a sense strand having modification pattern 1S, and an sense strand having modification pattern 1AS. The siRNAs in Table 6 (ETD00915-ETD00934) each comprised a sense strand having modification pattern 2S, and an sense strand having modification pattern 3AS. These siRNAs may include any modification pattern(s) (e.g. any of modification patterns 1S-9S, or 1AS-11AS).

TABLE 5
Knockdown Activity of ANGPTL4-Specific siRNAs
at 1 nM and 10 nM in Human U-138 MG cells

| | | | Relative ANGPTL4 | |
|---|---|---|---|---|
| | Sense | Antisense | mRNA Level | |
| | Strand | Strand | 1 nM | 10 nM |
| siRNA name | SEQ ID NO: | SEQ ID NO: | siRNA | siRNA |
| Untreated Cells | — | — | 1.00 | 1.00 |
| Negative Control | — | — | 1.15 | 1.14 |
| siRNA | | | | |
| ETD00646 | 14012 | 14167 | ND | 0.72 |
| ETD00647 | 14013 | 14168 | ND | 0.97 |
| ETD00648 | 14014 | 14169 | ND | 0.84 |
| ETD00649 | 14015 | 14170 | 0.94 | 0.69 |
| ETD00650 | 14016 | 14171 | ND | 2.08 |
| ETD00651 | 14017 | 14172 | 0.99 | 0.71 |
| ETD00652 | 14018 | 14173 | ND | 1.06 |
| ETD00653 | 14019 | 14174 | 1.03 | 0.63 |
| ETD00654 | 14020 | 14175 | 1.18 | 0.68 |
| ETD00655 | 14021 | 14176 | 1.05 | 0.65 |
| ETD00656 | 14022 | 14177 | ND | 0.86 |
| ETD00657 | 14023 | 14178 | ND | 0.96 |
| ETD00658 | 14024 | 14179 | ND | 0.87 |
| ETD00659 | 14025 | 14180 | ND | 1.02 |
| ETD00660 | 14026 | 14181 | ND | 0.84 |
| ETD00661 | 14027 | 14182 | ND | 0.84 |
| ETD00662 | 14028 | 14183 | ND | 0.82 |
| ETD00663 | 14029 | 14184 | ND | 0.94 |
| ETD00664 | 14030 | 14185 | ND | 0.97 |
| ETD00665 | 14031 | 14186 | ND | 1.22 |
| ETD00666 | 14032 | 14187 | ND | 1.24 |
| ETD00667 | 14033 | 14188 | ND | 0.88 |
| ETD00668 | 14034 | 14189 | ND | 1.00 |
| ETD00669 | 14035 | 14190 | 1.05 | 0.68 |
| ETD00670 | 14036 | 14191 | ND | 0.93 |
| ETD00671 | 14037 | 14192 | ND | 1.59 |
| ETD00672 | 14038 | 14193 | ND | 1.41 |
| ETD00673 | 14039 | 14194 | ND | 1.80 |
| ETD00674 | 14040 | 14195 | ND | 1.87 |
| ETD00675 | 14041 | 14196 | ND | 1.04 |
| ETD00676 | 14042 | 14197 | ND | 1.28 |
| ETD00677 | 14043 | 14198 | ND | 1.39 |
| ETD00678 | 14044 | 14199 | ND | 1.49 |
| ETD00679 | 14045 | 14200 | ND | 1.28 |
| ETD00680 | 14046 | 14201 | ND | 1.52 |
| ETD00681 | 14047 | 14202 | ND | 2.12 |
| ETD00682 | 14048 | 14203 | ND | 0.91 |
| ETD00683 | 14049 | 14204 | 1.06 | 0.47 |
| ETD00684 | 14050 | 14205 | 0.88 | 0.63 |
| ETD00685 | 14051 | 14206 | ND | 1.02 |
| ETD00686 | 14052 | 14207 | 0.79 | 0.66 |
| ETD00687 | 14053 | 14208 | ND | 0.91 |
| ETD00688 | 14054 | 14209 | ND | 0.84 |
| ETD00689 | 14055 | 14210 | 1.01 | 0.51 |
| ETD00690 | 14056 | 14211 | ND | 1.29 |
| ETD00691 | 14057 | 14212 | ND | 0.80 |
| ETD00692 | 14058 | 14213 | ND | 0.78 |
| ETD00693 | 14059 | 14214 | ND | 1.09 |
| ETD00694 | 14060 | 14215 | 1.16 | 0.58 |
| ETD00695 | 14061 | 14216 | ND | 1.79 |
| ETD00696 | 14062 | 14217 | ND | 1.55 |
| ETD00697 | 14063 | 14218 | ND | 1.42 |
| ETD00698 | 14064 | 14219 | ND | 1.83 |
| ETD00699 | 14065 | 14220 | ND | 1.10 |
| ETD00700 | 14066 | 14221 | ND | 1.33 |
| ETD00701 | 14067 | 14222 | ND | 1.13 |
| ETD00702 | 14068 | 14223 | ND | 0.85 |
| ETD00703 | 14069 | 14224 | ND | 1.26 |
| ETD00704 | 14070 | 14225 | ND | 1.14 |
| ETD00705 | 14071 | 14226 | ND | 1.72 |
| ETD00706 | 14072 | 14227 | ND | 1.63 |
| ETD00707 | 14073 | 14228 | ND | 0.92 |
| ETD00708 | 14074 | 14229 | ND | 1.69 |
| ETD00709 | 14075 | 14230 | 1.24 | 0.69 |
| ETD00710 | 14076 | 14231 | ND | 2.23 |
| ETD00711 | 14077 | 14232 | ND | 1.02 |
| ETD00712 | 14078 | 14233 | ND | 1.21 |
| ETD00713 | 14079 | 14234 | 1.09 | 0.48 |
| ETD00714 | 14080 | 14235 | 0.94 | 0.50 |
| ETD00715 | 14081 | 14236 | 0.98 | 0.65 |
| ETD00716 | 14082 | 14237 | 0.91 | 0.59 |
| ETD00717 | 14083 | 14238 | ND | 0.82 |
| ETD00718 | 14084 | 14239 | ND | 1.09 |
| ETD00719 | 14085 | 14240 | ND | 0.84 |
| ETD00720 | 14086 | 14241 | ND | 1.82 |
| ETD00721 | 14087 | 14242 | 0.64 | 0.47 |
| ETD00722 | 14088 | 14243 | ND | 1.52 |
| ETD00723 | 14089 | 14244 | ND | 1.08 |
| ETD00724 | 14090 | 14245 | ND | 0.91 |
| ETD00725 | 14091 | 14246 | ND | 0.93 |
| ETD00726 | 14092 | 14247 | ND | 0.90 |
| ETD00727 | 14093 | 14248 | ND | 0.76 |
| ETD00728 | 14094 | 14249 | 0.94 | 0.43 |
| ETD00729 | 14095 | 14250 | 1.08 | 0.71 |
| ETD00730 | 14096 | 14251 | ND | 0.80 |
| ETD00731 | 14097 | 14252 | 1.25 | 0.56 |
| ETD00732 | 14098 | 14253 | ND | 1.25 |
| ETD00733 | 14099 | 14254 | ND | 0.88 |
| ETD00734 | 14100 | 14255 | ND | 1.15 |
| ETD00735 | 14101 | 14256 | ND | 1.11 |
| ETD00736 | 14102 | 14257 | 0.90 | 0.48 |
| ETD00737 | 14103 | 14258 | ND | 1.10 |
| ETD00738 | 14104 | 14259 | ND | 0.83 |
| ETD00739 | 14105 | 14260 | ND | 1.33 |
| ETD00740 | 14106 | 14261 | ND | 1.40 |
| ETD00741 | 14107 | 14262 | ND | 0.96 |
| ETD00742 | 14108 | 14263 | ND | 1.30 |
| ETD00743 | 14109 | 14264 | 1.04 | 0.63 |
| ETD00744 | 14110 | 14265 | ND | 1.24 |
| ETD00745 | 14111 | 14266 | ND | 1.42 |
| ETD00746 | 14112 | 14267 | ND | 1.20 |
| ETD00747 | 14113 | 14268 | ND | 1.21 |

“—” untreated U-138MG cells; Negative Control siRNA, Silencer Select Negative Control #1;
ND, Not Determined

TABLE 6
Knockdown Activity of ANGPTL4-Specific siRNAs
at 1 nM and 10 nM in Human U-138 MG Cells

| | | | Relative ANGPTL4 | |
|---|---|---|---|---|
| | Sense | Antisense | mRNA Level | |
| | Strand | Strand | 1 nM | 10 nM |
| siRNA name | SEQ ID NO: | SEQ ID NO: | siRNA | siRNA |
| Untreated Cells | — | — | 1.00 | 1.00 |
| Negative Control | — | — | 1.23 | 1.10 |
| siRNA | | | | |
| ETD00915 | 14114 | 14269 | 1.05 | 0.85 |
| ETD00916 | 14115 | 14270 | 0.62 | 0.39 |
| ETD00917 | 14116 | 14271 | 0.84 | 0.86 |
| ETD00918 | 14117 | 14272 | 1.02 | 1.03 |
| ETD00919 | 14118 | 14273 | 1.01 | 1.02 |
| ETD00920 | 14119 | 14274 | 0.91 | 1.15 |
| ETD00921 | 14120 | 14275 | 0.78 | 0.48 |
| ETD00922 | 14121 | 14276 | 1.18 | 1.10 |
| ETD00923 | 14122 | 14277 | 0.91 | 0.93 |
| ETD00924 | 14123 | 14278 | 0.82 | 0.57 |
| ETD00925 | 14124 | 14279 | 0.79 | 0.57 |
| ETD00926 | 14125 | 14280 | 0.77 | 0.47 |
| ETD00927 | 14126 | 14281 | 0.98 | 0.73 |
| ETD00928 | 14127 | 14282 | 0.87 | 0.50 |
| ETD00929 | 14128 | 14283 | 0.91 | 0.54 |
| ETD00930 | 14129 | 14284 | 0.85 | 0.58 |
| ETD00931 | 14130 | 14285 | 0.85 | 0.46 |
| ETD00932 | 14131 | 14286 | 1.01 | 0.72 |
| ETD00933 | 14132 | 14287 | 0.38 | 0.33 |
| ETD00934 | 14133 | 14288 | 0.65 | 0.37 |

“—” untreated U-138MG cells; Negative Control siRNA, Silencer Select Negative Control #1;
ND, Not Determined

### Example 5: Determining the IC50 of ANGPTL4 siRNAs

[0379] The IC50 values for knockdown of ANGPTL4 mRNA by select ANGPTL4 siRNAs were determined in U-138 MG cells. The siRNAs were assayed individually at 30 nM, 10 nM, 3 nM, 1 nM and 0.3 nM, or 3 nM, 1 nM, 0.3 nM, 0.1 nM and 0.03 nM, or 30 nM, 10 nM, 3 nM, 1 nM, 0.3 nM, 0.1 nM and 0.03 nM. The U-138 MG (ATCC® HTB-16) cells were seeded in 96-well tissue culture plates at a cell density of 7,500 cells per well in EMEM (BD Biosciences Catalog No. 670086) supplemented with 10% fetal bovine serum and incubated overnight in a water-jacketed, humidified incubator at 37° C. in an atmosphere composed of air plus 5% carbon dioxide. The ANGPTL4 siRNAs were individually transfected into U-138 MG cells in triplicate wells using 0.3 μL Lipofectamine RNAiMax (Fisher) per well. After incubation for 48 hours at 37° C., total RNA was harvested from each well and cDNA prepared using TaqMan® Fast Advanced Cells-to-CT™ Kit (ThermoFisher, Catalog #A35374) according to the manufacturer's instructions. The level of ANGPTL4 mRNA from each well was measured in triplicate by real-time qPCR on an Applied Biosystems 7500 Fast Real-Time PCR machine using TaqMan Gene Expression Assay for human ANGPTL4 (ThermoFisher, assay #Hs01101127_m1). The level of PPIA mRNA was measured using TaqMan Gene Expression Assay (ThermoFisher, assay #Hs99999904 ml) and used to determine relative ANGPTL4 mRNA levels in each well using the delta-delta Ct method. All data were normalized to relative ANGPTL4 mRNA levels in untreated U-138 MG cells. Curve fit was accomplish using the [inhibitor] vs. response (three parameters) function in GraphPad Prism software. Results are shown in Table 7.

TABLE 7
IC50 Values of ANGPTL4 siRNAs in Human U-138 MG Cells

| | | | Relative ANGPTL4 | |
|---|---|---|---|---|
| siRNA | [siRNA] | | mRNA Levels | IC50 (nM) |
| — | — | | 1 | ND |
| ETD00714 | 30 | nM | 0.27 | 4.27 |
| | 10 | nM | 0.43 | |
| | 3 | nM | 0.52 | |
| | 1 | nM | 0.69 | |
| | 0.3 | nM | 0.75 | |
| ETD00721 | 30 | nM | 0.54 | 2.69 |
| | 10 | nM | 0.61 | |
| | 3 | nM | 0.86 | |
| | 1 | nM | 1.09 | |
| | 0.3 | nM | 1.21 | |
| ETD00728 | 30 | nM | 0.57 | 5.10 |
| | 10 | nM | 0.79 | |
| | 3 | nM | 0.95 | |
| | 1 | nM | 1.29 | |
| | 0.3 | nM | 1.27 | |
| ETD00736 | 30 | nM | 0.35 | 8.06 |
| | 10 | nM | 0.36 | |
| | 3 | nM | 0.76 | |
| | 1 | nM | 0.71 | |
| | 0.3 | nM | 0.78 | |
| ETD00916 | 3 | nM | 0.20 | 0.42 |
| | 1 | nM | 0.45 | |
| | 0.3 | nM | 0.68 | |
| | 0.1 | nM | 0.89 | |
| | 0.03 | nM | 1.07 | |
| ETD00921 | 30 | nM | 0.43 | 0.16 |
| | 10 | nM | 0.43 | |
| | 3 | nM | 0.49 | |
| | 1 | nM | 0.55 | |
| | 0.3 | nM | 0.86 | |
| | 0.1 | nM | 0.93 | |
| | 0.03 | nM | 1.30 | |
| ETD00924 | 30 | nM | 0.44 | 0.54 |
| | 10 | nM | 0.47 | |
| | 3 | nM | 0.52 | |
| | 1 | nM | 0.63 | |
| | 0.3 | nM | 0.82 | |
| | 0.1 | nM | 0.91 | |
| | 0.03 | nM | 0.99 | |
| ETD00925 | 3 | nM | 0.21 | ND |
| | 1 | nM | 0.69 | |
| | 0.3 | nM | 0.99 | |
| | 0.1 | nM | 0.87 | |
| | 0.03 | nM | 0.88 | |
| ETD00926 | 3 | nM | 0.46 | 0.91 |
| | 1 | nM | 0.84 | |
| | 0.3 | nM | 1.09 | |
| | 0.1 | nM | 1.21 | |
| | 0.03 | nM | 1.46 | |
| ETD00928 | 30 | nM | 0.56 | 0.13 |
| | 10 | nM | 0.47 | |
| | 3 | nM | 0.49 | |
| | 1 | nM | 0.55 | |
| | 0.3 | nM | 0.76 | |
| | 0.1 | nM | 1.45 | |
| | 0.03 | nM | 1.55 | |
| ETD00930 | 3 | nM | 0.70 | ND |
| | 1 | nM | 0.76 | |
| | 0.3 | nM | 0.95 | |
| | 0.1 | nM | 0.90 | |
| | 0.03 | nM | 1.07 | |
| ETD00931 | 3 | nM | 0.29 | ND |
| | 1 | nM | 0.77 | |
| | 0.3 | nM | 0.88 | |
| | 0.1 | nM | 0.97 | |
| | 0.03 | nM | 0.92 | |
| ETD00933 | 30 | nM | 0.26 | 0.13 |
| | 10 | nM | 0.26 | |
| | 3 | nM | 0.28 | |
| | 1 | nM | 0.29 | |
| | 0.3 | nM | 0.37 | |
| | 0.1 | nM | 0.67 | |
| | 0.03 | nM | 0.71 | |
| ETD00934 | 3 | nM | 0.53 | ND |
| | 1 | nM | 0.66 | |
| | 0.3 | nM | 0.65 | |
| | 0.1 | nM | 0.97 | |
| | 0.03 | nM | 0.98 | |

“—” untreated U-138 MG cells;
ND, Not Determined

[0380] Some siRNAs having sense strands in accordance with SEQ ID NOs: 13974-13977, and having antisense strands in accordance with SEQ ID NOs: 13982-13985, were synthesized with an alternative modification pattern and are included in Table 8. The siRNAs in Table 8 were based, at least partially, on siRNAs having sense strand sequences comprising the sequences of SEQ ID NOs: 759, 1285, 1580, and 1840, and having antisense strand sequences comprising the sequences of SEQ ID NOs: 2613, 3139, 3434, and 3694.

TABLE 8
Alternative Modification Patterns of Select siRNAs

| ETD# | Sense strand sequence (5′-3′) | Antisense strand sequence (5′-3′) |
|---|---|---|
| ETD01062 | csasgaGfuGfgAfcuauuugaaasusu | usUfsucaAfauaguccAfcUfcugsusu |
| ETD01063 | asgscuUfaAfgAfagggaaucuasusu | usAfsgauUfcccuucuUfaAfgcususu |
| ETD01064 | gsasucGfaGfgCfugcaggauaasusu | usUfsaucCfugcagccUfcGfaucsusu |
| ETD01065 | csasgaGfuUfcUfuggaauaaaasusu | usUfsuuaUfuccaagaAfcUfcugsusu |
| ETD# | Sense strand - SEQ ID NO: | Antisense strand - SEQ ID NO: |
| ETD01062 | 13986 | 14134 |
| ETD01063 | 13987 | 14135 |
| ETD01064 | 13988 | 14136 |
| ETD01065 | 13989 | 14137 |

[0381] IC50 values for knockdown of ANGPTL4 mRNA for ETD01062, ETD01063, ETD01064 and ETD01065 ANGPTL4 siRNAs were determined in U-138 MG cells. The siRNAs were assayed individually at 30 nM, 10 nM, 3 nM, 1 nM, 0.3 nM, 0.1 nM and 0.03 nM. The U-138 MG (ATCCR HTB-16) cells were seeded in 96-well tissue culture plates at a cell density of 7,500 cells per well in EMEM (BD Biosciences Catalog No. 670086) supplemented with 10% fetal bovine serum and incubated overnight in a water-jacketed, humidified incubator at 37° C. in an atmosphere composed of air plus 5% carbon dioxide. The ANGPTL4 siRNAs were individually transfected into U-138 MG cells in triplicate wells using 0.3 μL Lipofectamine RNAiMax (Fisher) per well. After incubation for 48 hours at 37° C., total RNA was harvested from each well and cDNA prepared using TaqMan® Fast Advanced Cells-to-CT™ Kit (ThermoFisher, Catalog #A35374) according to the manufacturer's instructions. The level of ANGPTL4 mRNA from each well was measured in triplicate by real-time qPCR on an Applied Biosystems 7500 Fast Real-Time PCR machine using TaqMan Gene Expression Assay for human ANGPTL4 (ThermoFisher, assay #Hs01101127_m1). The level of PPIA mRNA was measured using TaqMan Gene Expression Assay (ThermoFisher, assay #Hs99999904_m1) and used to determine relative ANGPTL4 mRNA levels in each well using the delta-delta Ct method. All data were normalized to relative ANGPTL4 mRNA levels in untreated U-138 MG cells. Curve fit was accomplished using the [inhibitor] vs. response (three parameters) function in GraphPad Prism software. Results are shown in Table 9.

TABLE 9
IC50 Values of ETD01062, ETD01063, ETD01064 and
ETD01065 ANGPTL4 siRNAs in Human U-138 MG Cells

| | | | Relative ANGPTL4 | |
|---|---|---|---|---|
| siRNA | [siRNA] | | mRNA Levels | IC50 (nM) |
| — | — | | 1 | ND |
| ETD01062 | 30 | nM | 0.41 | 0.22 |
| | 10 | nM | 0.39 | |
| | 3 | nM | 0.36 | |
| | 1 | nM | 0.42 | |
| | 0.3 | nM | 0.63 | |
| | 0.1 | nM | 0.70 | |
| | 0.03 | nM | 0.82 | |
| ETD01063 | 30 | nM | 0.68 | 1.24 |
| | 10 | nM | 0.62 | |
| | 3 | nM | 0.62 | |
| | 1 | nM | 0.71 | |
| | 0.3 | nM | 1.54 | |
| | 0.1 | nM | 1.15 | |
| | 0.03 | nM | 0.89 | |
| ETD01064 | 30 | nM | 0.83 | 0.25 |
| | 10 | nM | 0.41 | |
| | 3 | nM | 0.57 | |
| | 1 | nM | 0.57 | |
| | 0.3 | nM | 0.71 | |
| | 0.1 | nM | 1.27 | |
| | 0.03 | nM | 0.89 | |
| ETD01065 | 30 | nM | 0.24 | 0.07 |
| | 10 | nM | 0.23 | |
| | 3 | nM | 0.20 | |
| | 1 | nM | 0.27 | |
| | 0.3 | nM | 0.31 | |
| | 0.1 | nM | 0.42 | |
| | 0.03 | nM | 0.56 | |

“—” untreated U-138 MG cells;
ND, Not Determined

### Example 6: Assessing the Extent of Nuclease Resistance of ANGPTL4 siRNAs

[0382] Resistance of select ANGPTL4 siRNAs to nuclease digestion was assessed by incubating the siRNAs in rat liver tritosomes. Each siRNA (7 ng/μL final concentration) was placed into a PCR tube containing a cocktail prepared on ice containing 1× catabolic buffer (Xenotech, Catalog #K5200, Lot #18-1-0698), 0.5× rat tritosomes (Xenotech, Catalog #R0610.LT, Lot #1610405), 0.1 U/μL porcine intestinal heparin (Zageno, Catalog #H3149-10KU). An aliquot was removed, an equal volume of 50 mM EDTA was added, and the sample placed at −80° C. This sample was designated as the 0 hr timepoint. The remainder of the reaction was placed in an Eppendorf Mastercycler Gradient and incubated at 37° C. After incubation for 4 and 24 hours, an aliquot was removed from the reaction and stopped by addition of an equal volume of 50 mM EDTA and placed at −80° C. until analysis by gel electrophoresis. All samples were then thawed on ice and 6×DNA Gel Loading Dye (ThermoFisher Catalog #R0611) was added to 1× final concentration. 20 μL of each sample was loaded onto a 20% polyacrylamide TBE gel (ThermoFisher, Catalog #EC63155BOX). Electrophoresis was carried out at a constant 100V for 75 minutes in an XCell SureLock Mini-Cell Electrophoresis System (ThermoFisher) using 1×TBE (Tris/boric/EDTA) (Fisher, Catalog #FERB52) as the tank buffer. The siRNA was visualized by staining the gel with a 1:10,000 dilution of SYBR Gold (ThermoFisher, Catalog #S-11494) in TBE for 15 minutes at room temperature with rocking. The gel was washed with 1×TBE for 15 minutes and then placed on a FotoPrep1 UV transilluminator (Fotodyne). The gel was imaged using the camera app set on MONO on an iPhone 6s with a yellow gel filter (Neewer) placed over the lens. Band intensity was measured using NIH ImageJ using the “Analyze: Gels” function. The remaining siRNA percent was normalized to the value obtained at the 0 hr timepoint for that siRNA. Results are shown in Table 10. By using this assay, we were able to determine that some siRNAs are more resistant to nuclease digestion with more remaining intact over time compared with other siRNAs with the same modification pattern.

TABLE 10
Resistance of ANGPTL4 siRNAs to Nucleases
Present in Rat Liver Tritosomes

| siRNA | Timepoint (hr) | % remaining |
|---|---|---|
| ETD00686 | 0 | 100% |
| | 4 | 79% |
| | 24 | 27% |
| ETD00714 | 0 | 100% |
| | 4 | 66% |
| | 24 | 33% |
| ETD00721 | 0 | 100% |
| | 4 | 77% |
| | 24 | 47% |
| ETD00728 | 0 | 100% |
| | 4 | 74% |
| | 24 | 32% |
| ETD00736 | 0 | 100% |
| | 4 | 81% |
| | 24 | 39% |
| ETD00916 | 0 | 100% |
| | 4 | 85% |
| | 24 | 59% |
| ETD00924 | 0 | 100% |
| | 4 | 68% |
| | 24 | 24% |
| ETD00926 | 0 | 100% |
| | 4 | 74% |
| | 24 | 47% |
| ETD00928 | 0 | 100% |
| | 4 | 73% |
| | 24 | 25% |
| ETD00933 | 0 | 100% |
| | 4 | 73% |
| | 24 | 28% |

### Example 7: Screening ANGPTL4 ASOs for Activity in Cells in Culture

[0383] ANGPTL4 ASOs with sequences provided in SEQ ID NOs: 3709-13934 and those possessing modification pattern ASO1 (SEQ ID NO: 13969) are to be assayed for ANGPTL4 mRNA reduction activity in cells in culture. A cell line such as ARPE-19 that expresses ANGPTL4 (ATCC® CRL-2302) will be seeded in 96-well tissue culture plates at a cell density of 10,000 cells per well in DMEM supplemented with 10% fetal bovine serum and incubated overnight in a water-jacketed, humidified incubator at 37° C. in an atmosphere of air plus 5% carbon dioxide. The ANGPTL4 ASOs are individually transfected into cells in duplicate wells at 1 uM final concentration using 0.3 uL Lipofectamine RNAiMax (Fisher) per well. A negative control ASO (SEQ ID NO: 13953) is also transfected at 1 uM final concentration. After incubation for 48 hours at 37° C., total RNA is harvested from each well and cDNA prepared using TaqMan® Fast Advanced Cells-to-CT™ Kit (ThermoFisher, Catalog #A35374) according to the manufacturer's instructions. The level of ANGPTL4 mRNA from each well will be measured in triplicate by real-time qPCR on an Applied Biosystems 7500 Fast Real-Time PCR machine using TaqMan Gene Expression Assay for human ANGPTL4 (ThermoFisher, assay #Hs01101127 ml). The level of PPIA mRNA is measured using TaqMan Gene Expression Assay (ThermoFisher, assay #Hs99999904_m1) and used to determine relative ANGPTL4 mRNA levels in each well using the delta-delta Ct method. Data are normalized to relative ANGPTL4 mRNA levels in untreated ARPE-19 cells.

[0384] The ANGPTL4 ASOs showing the greatest degree of reduction of ANGPTL4 mRNA at 1 uM are to be tested in a second screen for activity at 100 nM concentration using the transfection procedures as described above.

### Example 8: GalNAc Ligand for Hepatocyte Targeting of Oligonucleotides

[0385] Without limiting the disclosure to these individual methods, there are at least two general methods for attachment of multivalent N-acetylgalactosamine (GalNAc) ligands to oligonucleotides: solid or solution-phase conjugations. GalNAc ligands may be attached to solid phase resin for 3′ conjugation or at the 5′ terminus using GalNAc phosphoramidite reagents. GalNAc phosphoramidites may be coupled on solid phase as for other nucleosides in the oligonucleotide sequence at any position in the sequence. Reagents for GalNAc conjugation to oligonucleotides are shown in Table 11.

TABLE 11
GalNAc Conjugation Reagents

| Type of | |
|---|---|
| conjugation | Structure |
| Solid phase 3′ attachment where squiggly line is rest of oligonucleotide chain and right-most OH is where attachment to solid phase is. | [chemical structure] This GalNAc ligand may be referred to as “GalNAc23” or “GalNAc#23.” |
| Solid phase 5′ attachment phosphoramidite | [chemical structure] |
| Solid phase 5′ attachment Phosphoramidite | [chemical structure] |
| Solution phase Carboxylic acid for amide coupling anywhere on oligonucleotide | [chemical structure] Where Ac is an acetyl group or other hydroxyl protecting group that can be removed under basic, acid or reducing conditions. |

[0386] In solution phase conjugation, the oligonucleotide sequence-including a reactive conjugation site—is formed on the resin. The oligonucleotide is then removed from the resin and GalNAc is conjugated to the reactive site.

[0387] The carboxy GalNAc derivatives may be coupled to amino-modified oligonucleotides. The peptide coupling conditions are known to the skilled in the art using a carbodiimide coupling agent like DCC (N,N′-Dicyclohexylcarbodiimide), EDC (N-(3-dimethylaminopropyl)-N′-ethylcarbodiimide) or EDC·HCl (N-(3-dimethylaminopropyl)-N′-ethylcarbodiimide hydrochloride and an additive like HOBt (1-hydroxybenztriazole), HOSu (N-hydroxysuccinimide), TBTU (N,N,N′,N′-Tetramethyl-O-(benzotriazol-1-yl)uronium tetrafluoroborate, HBTU (2-(1H-benzotriazol-1-yl)-1,1,3,3-tetramethyluronium hexafluorophosphate) or HOAt (1-Hydroxy-7-azabenzotriazole and common combinations thereof such as TBTU/HOBt or HBTU/HOAt to form activated amine-reactive esters.

[0388] Amine groups may be incorporated into oligonucleotides using a number of known, commercially available reagents at the 5′ terminus, 3′ terminus or anywhere in between.

[0389] Non-limiting examples of reagents for oligonucleotide synthesis to incorporate an amino group include:
[0390] 5′ attachment:
[0391] 6-(4-Monomethoxytritylamino)hexyl-(2-cyanoethyl)-(N,N-diisopropyl)-phosphoramidite CAS Number: 114616-27-2
[0392] 5′-Amino-Modifier TEG CE-Phosphoramidite
[0393] 10-(O-trifluoroacetamido-N-ethyl)-triethyleneglycol-1-[(2-cyanoethyl)-(N,N-diisopropyl)]-phosphoramidite
[0394] 3′ attachment:
[0395] 3′-Amino-Modifier Serinol CPG
[0396] 3-Dimethoxytrityloxy-2-(3-(fluorenylmethoxycarbonylamino)propanamido)propyl-1-O-succinyl-long chain alkylamino-CPG (where CPG stands for controlled-pore glass and is the solid support)
[0397] Amino-Modifier Serinol Phosphoramidite
[0398] 3-Dimethoxytrityloxy-2-(3-(fluorenylmethoxycarbonylamino)propanamido)propyl-1-O-(2-cyanoethyl)-(N,N-diisopropyl)-phosphoramidite

[0399] Internal (base modified):
[0400] Amino-Modifier C6 dT
[0401] 5′-Dimethoxytrityl-5-[N-(trifluoroacetylaminohexyl)-3-acrylimido]-2′-deoxyUridine,3′-[(2-cyanoethyl)-(N,N-diisopropyl)]-phosphoramidite. CAS Number: 178925-21-8

[0402] Solution phase conjugations may occur after oligonucleotide synthesis via reactions between non-nucleosidic nucleophilic functional groups that are attached to the oligonucleotide and electrophilic GalNAc reagents. Examples of nucleophilic groups include amines and thiols, and examples of electrophilic reagents include activated esters (e.g. N-hydroxysuccinimide, pentafluorophenyl) and maleimides.

### Example 9: Inhibition of ANGPTL4 in a Mouse Model of Hypertriglyceridemia

[0403] In this experiment, a murine model of hypertriglyceridemia is to be used to evaluate the effect of siRNA or ASO inhibition of ANGPTL4 expressed in the liver compared to an anti-mouse ANGPTL4 antibody. The mouse strain C57Bl/6 Apoetm1Unc mice (Jackson Labs) will be maintained on a high fat Western diet (Research Diets, D12492; 60% fat by calories).

[0404] Four groups of mice (n=12/group) will be utilized in this study. Animals will be maintained on a high fat diet during the study. On Day −4 before the first injection, chow will be removed for an overnight fast. On Day −3 before the first injection, all animals will be anesthetized and 300 uL of blood collected in serum separator tubes via the submandibular vein to assess baseline triglyceride, serum glucose, insulin sensitivity, total cholesterol levels, HDL Cholesterol levels, liver function and serum levels of ANGPTL4 protein. On Study Day 0, Group 1 mice will be injected intraperitoneally with 600 uL normal saline, Group 2 mice will be injected intraperitoneally with 600 ug of anti-mouse ANGPTL4 antibody in 600 uL, Group 3 mice will be injected subcutaneously with 100 ug of GalNAc-ANGPTL4 siRNA targeting mouse ANGPTL4 with sense strand selected from sequences provided in SEQ ID NO: 13937-13944, 14289, or 14291, and antisense strands selected from sequences provided in SEQ ID NO: 13945-13952, 14290, or 14292, in 200 uL of normal saline, and Group 4 mice will be injected subcutaneously with 150 ug of GalNAc-ANGPTL4 ASO targeting mouse ANGPTL4 in 200 uL of normal saline. The sense strands selected from sequences provided in SEQ ID NO: 13937-13944, 14289, or 14291 will comprise a GalNAc ligand attached to the 3′ end of the sense strands. On the afternoon of Day 3, the chow will be removed from all Groups for an overnight fast. On Day 4, the animals from all Groups will be anesthetized and 150 uL of blood collected in serum separator tubes via the submandibular vein to assess serum triglycerides, glucose, total cholesterol, HDL cholesterol and levels of ANGPTL4 protein. Animals from all groups will then undergo an oral glucose tolerance test and insulin tolerance test to evaluate insulin sensitivity. Chow will be supplied again as normal after blood has been collected and insulin sensitivity tests conducted. Weekly thereafter starting on Day 7 the animals from Group 2 will be dosed as on Day 0 for a total of 15 injections. Every other week thereafter starting on Day 14 the animals from Group 3 and Group 4 will be dosed as on Day 0 for a total of 8 injections. Every other week starting on Day 10, the mice from all Groups will be fasted (overnight) and bled (150 uL into serum separator tubes) to assess serum triglyceride, glucose, total cholesterol, HDL cholesterol and levels of ANGPTL4 protein, and undergo insulin sensitivity tests. On the third day after the final injection, the chow will be removed from all Groups for an overnight fast. On the fourth day after the final injection, the animals from all Groups will be anesthetized, euthanized and bled via cardiac puncture to collect 500 uL of blood into serum separator tubes to assess triglyceride, serum glucose, insulin sensitivity, total cholesterol levels, HDL cholesterol levels, liver function and serum levels of ANGPTL4 protein. Tissue from the liver, small intestine and mesenteric lymph nodes will be collected from all animals and immersed in 10% neutral buffered formalin for histopathological analysis. A liver sample will also be collected from all animals and placed in RNAlater. The levels of ANGPTL4 mRNA will be assessed by RT-qPCR using TaqMan assays for mouse ANGPTL4 (ThermoFisher, assay #Mm00480431_m1) and the mouse housekeeping gene PPIA (ThermoFisher, assay #Mm02342430_g1).

[0405] Animals treated with the anti-mouse ANGPTL4 antibody (Group 2), mice treated with GalNAc-ANGPTL4 siRNA (Group 3), and mice treated with GalNAc-ANGPTL4 ASO (Group 4) are expected to have decreased triglycerides, total serum cholesterol, serum glucose as well as decreased serum ANGPTL4 protein levels, and increased HDL cholesterol and insulin sensitivity, compared with mice from Group 1 (saline). Animals in Group 2 and Group 3 are also expected to have decreased ANGPTL4 mRNA in liver samples.

### Example 10: Inhibition of ANGPTL4 in Non-Human Primates Using GalNAc-ANGPTL4 siRNA and GalNAc-ANGPTL4 ASO

[0406] In this experiment, a NHP model of hypertriglyceridemia is used to evaluate the effect of siRNA or ASO inhibition of ANGPTL4 expressed in the liver. Three groups of cynomolgus monkeys will be used (n=5/group) that are placed on a high-fat diet (Western Primate Diet, 5S2T) before the initiation of the study. Alternatively, three groups of rhesus monkeys will be used (n=5/group) that are placed on a high fructose diet before the initiation of the study. Animals are to be given 7 biweekly subcutaneous injections of saline (Group 1), GalNAc-ANGPTL4 siRNA (Group 2), or GalNAc-ANGPTL4 ASO (Group 3). The modified GalNAc-ANGPTL4 siRNA sequences are chosen from subset A that are cross-reactive between human and NHP, and include any one of modification patterns 1S-9S and 1AS-11AS, or another pattern of modification described herein. Other GalNAc-ANGPTL4 siRNA sequences may be chosen from subset F that are cross-reactive between human and NHP, or modifications thereof. Blood samples for lipid and glycemic measurements will be collected at baseline and at 4, 8, and 14 weeks of the study and analyzed for lipid content, serum glucose, insulin sensitivity and ANGPTL4 protein. All animals from each group are necropsied 2 weeks after the last blood collection. Tissue from the liver, small intestine and mesenteric lymph nodes will be collected from all animals and immersed in 10% neutral buffered formalin for histopathological analysis. A liver sample will also be collected from all animals and placed in RNAlater. The levels of ANGPTL4 mRNA will be assessed by RT-qPCR using TaqMan assays for cynomolgus ANGPTL4 (ThermoFisher, assay #Mf01101127_m1) or rhesus ANGPTL4, and the cynomolgus housekeeping gene PPIA (ThermoFisher, assay #Mf04932064_gH) or rhesus PPIA.

[0407] It is expected that animals treated with the GalNAc ANGPTL4 siRNA (Group 2) and animals treated with GalNAc-ANGPTL4 ASO (Group 3) will show decreased triglycerides, total serum cholesterol and serum glucose as well as decreased serum ANGPTL4 protein levels, and increased HDL cholesterol and insulin sensitivity, compared with animals from Group 1 (saline). It is also expected that animals in Group 1 and Group 3 will show decreased ANGPTL4 mRNA in liver samples.

### Example 11: Inhibition of ANGPTL4 in a Clinical Trial Using GalNAc-ANGPTL4 siRNA and GalNAc-ANGPTL4 ASO

[0408] In this study, human subjects with hypertriglyceridemia are used to evaluate the effect of siRNA or ASO inhibition of ANGPTL4 expressed in the liver. Selection criteria for inclusion in the study are ages 40-90, BMI≥30, and serum triglycerides ≥250 mg/dL. Three groups of subjects will be included (n=15/group) in the study. Subjects are to be given 5 weekly subcutaneous injections of saline (Group 1), GalNAc-ANGPTL4 siRNA (Group 2), or GalNAc-ANGPTL4 ASO (Group 3). The modified GalNAc-ANGPTL4 siRNA sequences are chosen from subset A that show high activity in cells in culture in the experiments of Example 4. Blood samples for lipid and glycemic measurements will be collected at baseline and at 3, 6, and 12 weeks of the study and analyzed for lipid content, serum glucose, insulin sensitivity, ANGPTL4 protein, and liver and kidney function.

[0409] It is expected that subjects treated with the GalNAc ANGPTL4 siRNA (Group 2) and subjects treated with GalNAc-ANGPTL4 ASO (Group 3) will show decreased triglycerides, total serum cholesterol and serum glucose as well as decreased serum ANGPTL4 protein levels, and increased HDL cholesterol and insulin sensitivity, compared with subjects from Group 1 (saline).

### Example 12: siRNA-Mediated Knockdown of ANGPTL4 in a Mouse Model of Hypertriglyceridemia

[0410] The effects of siRNA-mediated knockdown of ANGPTL4 in the liver was investigated in a murine model of hypertriglyceridemia. Eight- to ten-week-old C57Bl/6 Apoetm1Unc mice (Jackson Labs) were placed on a high fat Western diet (Research Diets, D12492; 60% fat by calories) for two weeks prior to the start of the study on Day 0. On Day 0 and Day 7, mice in Group 1 (n=4) were given 200 uL of phosphate buffered saline (PBS) and mice in Group 2 (n=4) were given 200 ug of the siRNA targeting mouse ANGPTL4 (ETD00642: sense strand having the sequence of SEQ ID NO: 13941 and a 3′ conjugated GalNAc ligand, and antisense strand having the sequence of SEQ ID NO: 13949) in 200 uL PBS by subcutaneous injection. Serum samples were collected from all mice fed ad libidum on Day 13. On Day 14, serum samples were collected from all mice after a 24 hour fast. Clinical chemistry assays including those for triglyceride and glucose were performed at IDEXX Laboratories, Incorporated. All mice were then euthanized and a liver sample from each was collected and placed in RNAlater (ThermoFisher Cat #AM7020). Total liver RNA was prepared by homogenizing the liver tissue in homogenization buffer (Maxwell RSC simplyRNA Tissue Kit) using a Percellys 24 tissue homogenizer (Bertin Instruments) set at 5000 rpm for two 10 second cycles. Total RNA from the lysate was purified on a Maxwell RSC 48 platform (Promega Corporation) according to the manufacturer's recommendations. The levels of liver ANGPTL4 mRNA were assessed by RT-qPCR using TaqMan assays for mouse ANGPTL4 (ThermoFisher, assay #Mm00480431_m1) and the mouse housekeeping gene PPIA (ThermoFisher, assay #Mm02342430_g1). Data were normalized to the level in animals receiving PBS (Group 1). Results are shown in Table 12. Mice receiving ETD00642 (Group2) had reduced levels of liver ANGPTL4 mRNA compared to mice receiving PBS (Group 1).

TABLE 12
Day 14 ANGPTL4 mRNA Levels in Mice Treated with ETD00642

| | | Relative Liver | Mean Relative |
|---|---|---|---|
| | | ANGPTL4 | Liver ANGPTL4 |
| Group # | Animal # | mRNA Level | mRNA level |
| 1 | 1 | 1.30 | 1.00 |
| | 2 | 0.95 | |
| | 3 | 1.11 | |
| | 4 | 0.73 | |
| 2 | 5 | 0.48 | 0.47 |
| | 6 | 0.55 | |
| | 7 | 0.51 | |
| | 8 | 0.36 | |

[0411] The levels of triglycerides and glucose are shown in Table 13. The serum triglyceride levels in fed mice on Day 13 and fasted mice on Day 14 were lower in mice receiving ETD00642 (Group 2) than in control mice receiving PBS (Group 1). The serum glucose levels in fed mice on Day 13 were lower in mice receiving ETD00642 (Group 2) than in control mice receiving PBS (Group1). The serum glucose levels in fasted mice on Day 14 were also lower in mice receiving ETD00642 (Group 2) than in control mice receiving PBS (Group 1), but the difference between Groups was less than that in the fasted mice.

TABLE 13
Triglyceride and Glucose Levels in Mice Treated with ETD00642

| | | Triglycerides (mg/dL) | | | | Glucose (mg/dL) | | | |
|---|---|---|---|---|---|---|---|---|---|
| Group | Animal | Fed (Day 13) | | Fasted (Day 14) | | Fed (Day 13) | | Fasted (Day 14) | |
| # | # | individual | Mean | individual | Mean | individual | Mean | individual | Mean |
| 1 | 1 | 180 | 201 | 119 | 117 | 297 | 296 | 129 | 103 |
| | 2 | 213 | | 135 | | 300 | | 110 | |
| | 3 | 193 | | 99 | | 305 | | 91 | |
| | 4 | 217 | | 113 | | 280 | | 80 | |
| 2 | 5 | 148 | 140 | 65 | 69 | 210 | 202 | 97 | 89 |
| | 6 | 158 | | 66 | | 218 | | 100 | |
| | 7 | 66 | | 61 | | 221 | | 76 | |
| | 8 | 186 | | 85 | | 158 | | 83 | |

### Example 13: Activity of siRNAs Targeting ANGPTL4 in Non-Human Primates

[0412] The activity of four siRNAs targeting ANGPTL4 were tested individually in cynomolgus monkeys. The siRNAs utilized in this study included ETD01117, ETD01118, ETD011119, and ETD01120 (see Table 16 for siRNA details).

[0413] Female cynomolgus monkeys (Macaca fascicularis, Cambodian origin, Orient BioResource Center, Alice, TX) were at least 18 months of age and weighed 2.5-3 kg at study start. After arrival, the animals were pair housed in stainless steel cages suspended over flush pans. Fluorescent lighting on a 12 hour on/off cycle was used and the temperature maintained at 18-29 QC at a target relative humidity of 30-70% with at least 10-15 air exchanges per hour. Animals were acclimated for a period of at least twenty-eight days, during which time they were examined for overall general health and observed daily. Animals were limit fed daily with certified primate diet (5048). Tap water was provided ad libitum.

[0414] Monkeys (3/group) were administered the siRNA test article once on Day 0 by subcutaneous injection as described in Table 14. In-life, animals were evaluated for clinical signs of toxicity, body weights, and food consumption. Prior to and during the study evaluations for clinical chemistry parameters were performed.

TABLE 14
siRNA Dosing Information

| | | Dosage | Conc. | Animal |
|---|---|---|---|---|
| Group | siRNA | (mg/kg) | (mg/mL) | No. |
| 1 | ETD01117 | 5 | 50 | 1-3 |
| 2 | ETD01118 | 5 | 50 | 4-6 |
| 3 | ETD01119 | 5 | 50 | 7-9 |
| 4 | ETD01120 | 5 | 50 | 10-12 |

[0415] Whole blood (approximately 2-3 mL) was collected from fasted animals twice prior to first dose (Day −7 and −2), and from surviving animals on Days 7, 14. Whole blood (approximately 2-3 mL) was collected from non-fasted animals once prior to dosing (Day −8). Blood samples were analyzed for clinical chemistry parameters, processed to serum for measurement of ANGPTL4 levels, and processed to plasma for lipoprotein profile assay.

[0416] An AlphaLISA immunoassay (PerkinElmer AL3017) was used to measure serum ANGPTL4 levels according to the recommended protocols provided by the manufacturer. Briefly, standard analyte (recombinant human ANGPTL4 encoding residues Gly26-Ser406) and serum samples were prepared in 1× AlphaLISA Assay Buffer (PerkinElmer AL000C). For each assay, 5 μL of prepared standard analyte or diluted sample were added to a 96-well white ½ Area OptiPlate (PerkinElmer 6002290) followed by the addition of 10 μL of Acceptor bead mix. Then the plate was sealed with TopSeal A-PLUS (PerkinElmer 6050185) and incubated for 30 minutes at room temperature. Next, 10 μL of biotinylated antibody was added to each well of the plate. The plate was sealed and incubated for 60 minutes at room temperature. Afterwards, 25 μL of streptavidin Donor beads were added in the dark to prevent photobleaching. The plate was sealed, covered with foil, and incubated at room temperature for 30 minutes prior to measuring AlphaLISA signal. All Alpha assays were measured on the Alpha-enabled EnVision multilabel plate reader using the 640as mirror module (#444) and the M570w emission filter (#244). Standard Alpha measurement settings were used: excitation wavelength at 680 nm was used to excite Donor beads and emission wavelength at 615 nm measured as Alpha signal; total measurement time 550 ms and excitation time 180 ms were used. A standard curve was generated by plotting the Alpha signal counts versus the concentration of analyte using GraphPad Prism version 9 for macOS (GraphPad Software). The curve was fit according to a nonlinear regression using the 4-parameter logistic equation (sigmoidal dose-response curve with variable slope) and a 1/Y2 data weighting. Signal for samples was converted to pg/mL from interpolation of the standard curve from each plate and corrected for dilution of sample prior to assay. The results are shown in Table 15. Results indicate that after treatment with siRNAs targeting ANGPTL4 the mean levels of ANGPTL4 protein in serum were reduced. In addition, mean levels of serum ANGPTL4 protein levels were lower in fed animals than in fasted animals.

TABLE 15
Serum ANGPTL4 Protein Levels in Non-Human
Primates Treated with ANGPTL4 siRNAs

| Group # | | | Group |
|---|---|---|---|
| (n = 3) | siRNA | Day | Means* |
| 1 | ETD01117 | −8 (fed) | 0.66 |
| | | −7 | 0.97 |
| | | −2 | 1.03 |
| | | 7 | 0.66 |
| | | 14 | 0.38 |
| 2 | ETD01118 | −8 (fed) | 0.68 |
| | | −7 | 1.10 |
| | | −2 | 0.90 |
| | | 7 | 0.61 |
| | | 14 | 0.68 |
| 3 | ETD01119 | −8 (fed) | 0.73 |
| | | −7 | 1.07 |
| | | −2 | 0.93 |
| | | 7 | 0.50 |
| | | 14 | 0.65 |
| 4 | ETD01120 | −8 (fed) | 0.49 |
| | | −7 | 0.94 |
| | | −2 | 1.06 |
| | | 7 | 0.52 |
| | | 14 | 0.52 |

*relative to the mean of Day −7 and Day −2 values in each group

### Example 14: siRNAs Targeting ANGPTL4

[0417] Some non-limiting examples of siRNAs have one or more characteristics of the siRNAs in Table 16.

TABLE 16
Exemplary modified siRNAs

| | | | Antisense |
|---|---|---|---|
| | Sense Strand | | Strand |
| | Sequence - | Additional Characteristic | Sequence - |
| siRNA Name | SEQ ID NO: | of Sense Strand | SEQ ID NO: |
| ETD01062 | 13986 | — | 14134 |
| ETD01063 | 13987 | — | 14135 |
| ETD01064 | 13988 | — | 14136 |
| ETD01065 | 13989 | — | 14137 |
| ETD01117 | 13990 | GalNAc#23 conjugated | 14134 |
| | | at 3′ end | |
| ETD01118 | 13991 | GalNAc#23 conjugated | 14135 |
| | | at 3′ end | |
| ETD01119 | 13992 | GalNAc#23 conjugated | 14136 |
| | | at 3′ end | |
| ETD01120 | 13993 | GalNAc#23 conjugated | 14137 |
| | | at 3′ end | |
| ETD01117.1 | 13994 | GalNAc ligand conjugated | 14134 |
| | | at 5′ end | |
| ETD01118.1 | 13995 | GalNAc ligand conjugated | 14135 |
| | | at 5′ end | |
| ETD01119.1 | 13996 | GalNAc ligand conjugated | 14136 |
| | | at 5′ end | |
| ETD01120.1 | 13997 | GalNAc ligand conjugated | 14137 |
| | | at 5′ end | |
| ETD01117.2 | 13998 | GalNAc ligand conjugated | 14134 |
| | | at 5′ end | |
| ETD01118.2 | 13999 | GalNAc ligand conjugated | 14135 |
| | | at 5′ end | |
| ETD01119.2 | 14000 | GalNAc ligand conjugated | 14136 |
| | | at 5′ end | |
| ETD01120.2 | 14001 | GalNAc ligand conjugated | 14137 |
| | | at 5′ end | |
| ETD01117.3 | 14006 | GalNAc ligand conjugated | 14138 |
| | | at 5′ end | |
| ETD01118.3 | 14007 | GalNAc ligand conjugated | 14139 |
| | | at 5′ end | |
| ETD01119.3 | 14008 | GalNAc ligand conjugated | 14140 |
| | | at 5′ end | |
| ETD01120.3 | 14009 | GalNAc ligand conjugated | 14141 |
| | | at 5′ end | |
| ETD01117.4 | 14006 | GalNAc ligand conjugated | 14142 |
| | | at 5′ end | |
| ETD01118.4 | 14007 | GalNAc ligand conjugated | 14143 |
| | | at 5′ end | |
| ETD01119.4 | 14008 | GalNAc ligand conjugated | 14144 |
| | | at 5′ end | |
| ETD01120.4 | 14009 | GalNAc ligand conjugated | 14145 |
| | | at 5′ end | |
| ETD01117.5 | 14006 | GalNAc ligand conjugated | 14146 |
| | | at 5′ end | |
| ETD01118.5 | 14007 | GalNAc ligand conjugated | 14147 |
| | | at 5′ end | |
| ETD01119.5 | 14008 | GalNAc ligand conjugated | 14148 |
| | | at 5′ end | |
| ETD01120.5 | 14009 | GalNAc ligand conjugated | 14149 |
| | | at 5′ end | |
| ETD01117.6 | 14006 | GalNAc ligand conjugated | 14150 |
| | | at 5′ end | |
| ETD01118.6 | 14007 | GalNAc ligand conjugated | 14151 |
| | | at 5′ end | |
| ETD01119.6 | 14008 | GalNAc ligand conjugated | 14152 |
| | | at 5′ end | |
| ETD01120.6 | 14009 | GalNAc ligand conjugated | 14153 |
| | | at 5′ end | |
| ETD01117.7 | 14002 | GalNAc ligand conjugated | 14154 |
| | | at 5′ end | |
| ETD01118.7 | 14003 | GalNAc ligand conjugated | 14155 |
| | | at 5′ end | |
| ETD01119.7 | 14004 | GalNAc ligand conjugated | 14156 |
| | | at 5′ end | |
| ETD01120.7 | 14005 | GalNAc ligand conjugated | 14157 |
| | | at 5′ end | |
| ETD01162 | 14005 | GalNAc#23 conjugated | 14298 |
| GalNAc#23 | | at 3′ end | |
| ETD00164 | 14005 | GalNAc#23 conjugated | 14153 |
| GalNAc#23 | | at 3′ end | |
| ETD01178 | 14005 | GalNAc ligand conjugated | 14298 |
| | | at 5′ end | |
| ETD01179 | 14299 | GalNAc ligand conjugated | 14298 |
| | | at 5′ end | |

### Example 15: Effects of Chronic Dosing of an ANGPTL4 siRNA Versus an Anti-ANGPTL4 Antibody in a Mouse Model of Hypertriglyceridemia

[0418] A comparison of the effects of chronic exposure of anti-ANGPTL4 antibody and ANGPTL4 siRNA was investigated in a murine model of hypertriglyceridemia. Eight- to ten-week-old C57Bl/6 Apoetm1Unc mice (Jackson Labs) were placed on a high fat Western diet (Research Diets, D12492; 60% fat by calories) for approximately 6 weeks prior to the start of the study on Day 0. On Days 0, 7, 14, 21, 28, 35, 42, 49, 56, 63, 70, 77, 84, 91 and 98 mice in Group 1 (n=12) were administered 200 uL of phosphate buffered saline (PBS) by subcutaneous injection, mice in Group 2 (n=12) were administered 800 ug of 14D12 anti-ANGPTL4 monoclonal antibody (Creative Biosciences) in 160 uL PBS by intraperitoneal injection, and mice in Group 3 (n=12) were given 50 ug of the siRNA targeting mouse ANGPTL4 in 100 uL PBS by subcutaneous injection. The siRNA targeting mouse ANGPTL4 included ETD00971 conjugated to GalNAc #23, and was designated “ETD00971 GalNAc #23.” Animals were maintained on a high fat diet during the study. Sequence information for ETD00971 is indicated in Table 1.

[0419] On Days −8, 6, 13, 20, 34, 48, 78 and 90, all animals were subjected to a 24 hr fast and 300 uL of blood was collected in serum separator tubes via the submandibular vein to assess serum triglyceride levels. Clinical chemistry assays were performed at IDEXX Laboratories, Incorporated. On Day 104, all surviving mice were euthanized, livers were weighed, and livers, small intestines, mesenteric lymph nodes and epididymal adipose tissues were harvested and placed in 10% formalin prior to histopathological analysis. A separate liver sample from each mouse was collected and placed in RNAlater (ThermoFisher Cat #AM7020). Total liver RNA was prepared by homogenizing the liver tissue in homogenization buffer (Maxwell RSC simplyRNA Tissue Kit) using a Percellys 24 tissue homogenizer (Bertin Instruments) set at 5000 rpm for two 10 second cycles. Total RNA from the lysate was purified on a Maxwell RSC 48 platform (Promega Corporation) according to the manufacturer's recommendations. The levels of liver ANGPTL4 mRNA were assessed by RT-qPCR using TaqMan assays for mouse ANGPTL4 (ThermoFisher, assay #Mm00480431_m1) and the mouse housekeeping gene PPIA (ThermoFisher, assay #Mm02342430_g1). Data were normalized to the level in animals receiving PBS (Group 1). Results are shown in Table 17. Mice receiving ETD00971 GalNAc #23 (Group 3) had highly reduced levels of liver ANGPTL4 mRNA compared to mice receiving PBS (Group 1) or 14D12 antibody (Group 3).

TABLE 17
Liver ANGPTL4 mRNA Levels in Mice After Chronic
Dosing with 14D12 Antibody or ANGPTL4 siRNA

| | | | Relative | Mean Relative |
|---|---|---|---|---|
| Group | | Animal | Liver ANGPTL4 | Liver ANGPTL4 |
| # | Treatment | # | mRNA Level | mRNA level |
| 1 | PBS | 1 | 0.75 | 1.00 |
| | | 2 | 1.04 | |
| | | 3 | 0.70 | |
| | | 4 | 0.76 | |
| | | 5 | 0.78 | |
| | | 6 | 1.23 | |
| | | 7 | 0.89 | |
| | | 8 | 1.28 | |
| | | 9 | 1.68 | |
| | | 10 | 1.02 | |
| | | 11 | 1.04 | |
| | | 12 | 1.25 | |
| 2 | 14D12 | 13 | 0.76 | 0.70 |
| | | 14 | 0.90 | |
| | | 15 | 0.84 | |
| | | 16 | 0.58 | |
| | | 17 | 0.86 | |
| | | 18 | 0.28 | |
| | | 19 | 0.63 | |
| | | 20 | 0.94 | |
| | | 21 | 0.64 | |
| | | 22 | 0.67 | |
| | | 23 | ND* | |
| | | 24 | 0.93 | |
| 3 | ETD00971 | 25 | 0.17 | 0.17 |
| | GalNAc#23 | 26 | 0.22 | |
| | | 27 | 0.19 | |
| | | 28 | 0.17 | |
| | | 29 | ND* | |
| | | 30 | 0.16 | |
| | | 31 | 0.10 | |
| | | 32 | 0.11 | |
| | | 33 | 0.19 | |
| | | 34 | 0.25 | |
| | | 35 | 0.19 | |
| | | 36 | 0.24 | |

ND*: found moribund prior to study termination

[0420] The levels of serum triglycerides are shown in Table 18. The serum triglyceride levels were lower in both the fasted and fed states in mice treated with ETD00971 GalNAc #23 (Group 3) or 14D12 (Group 2) than in control mice receiving PBS (Group 1). Thus, compositions comprising oligonucleotides such as siRNAs targeting ANGPTL4 may be useful for decreasing circulating triglycerides in a subject.

TABLE 18
Mean Serum Triglyceride Levels in Mice After Chronic
Dosing with 14D12 Antibody or ANGPTL4 siRNA

| | Mean Serum Triglyceride (mg/dL) | | |
|---|---|---|---|
| | | | Group 3 - ETD00971 |
| Day | Group 1 - PBS | Group 2 - 14D12 | GalNAc#23 |
| −8 | 100 | 121 | 110 |
| 6 | 121 | 63 | 84 |
| 13 | 112 | 50 | 78 |
| 20 | 103 | 47 | 71 |
| 34 | 107 | 54 | 71 |
| 48 | 131 | 52 | 66 |
| 76 | 139 | 66 | 72 |
| 90 | 139 | 54 | 65 |

[0421] Tissues listed above from all mice were trimmed, processed in a routine manner, embedded in paraffin, sectioned, stained with hematoxylin and eosin, and examined microscopically.

[0422] In control Group 1, mesenteric lymph nodes had small, cleft-like subcapsular sinuses and few cortical macrophages with small amounts of phagocytosed cells/debris. The mesentery associated with the control lymph nodes was unremarkable. In these animals, the small intestine had slender villi and smooth serosal surfaces.

[0423] By contrast, extensive morphological changes were present in animals that received the 14D12 mAb (Group 2). Granulomatous inflammation in the lymph nodes of these animals was characterized by the dilated subcapsular sinuses containing basophilic extracellular material; macrophages as well as multinucleated giant cells were present multifocally in cortex as well as medulla. The granulomatous inflammation multifocally extended into the mesentery and was also present on seral surfaces of the small intestine. However, the small intestinal mucosa was essentially normal in these animals, and their villi were slender. The epididymal adipose tissue was also essentially normal in animals that received the 14D12 mAb. However, minimal infiltrate (mononuclear cell and/or mixed cell type) was observed occurring at a higher frequency in Group 2 (10/11 animals examined) compared to Groups 1 (5/11 animals examined) and Group 3 (2/12 animals examined). In general, hepatocellular vacuolation was less severe in Group 2 animals administered the 14D12 mAb than those of control Group 1 mice.

[0424] Most of the lymph nodes of animals that received ETD00971 GalNAc #23 (Group 3) were relatively normal, without evidence of a granulomatous inflammatory reaction. A few lymph nodes had increased infiltrates of macrophages with cellular debris (similar to the control Group 1 animals). The mesentery and small intestine of these animals were also essentially normal, except for one animal that had a minimal mesenteric granulomatous inflammation. As in other groups, the epididymal adipose tissue was unremarkable. Hepatocytes in Group 3 had vacuolation but it was less severe and less frequent than in animals receiving 14D12 mAb (Group 2) or PBS (Group 1), indicating reduced hepatic steatosis in animals that received ETD00971 GalNAc #23 (Group 3) than in animals that received 14D12 mAb (Group 2) or PBS (Group 1). These data indicate that targeting ANGPTL4 may be useful for treating a subject with obesity or a liver disease such as NAFLD or NASH, and for decreasing a liver steatosis measurement. Some examples of liver steatosis measurements include a liver fat percentage measurement or a NAFLD activity score. These data further indicate that oligonucleotides such as siRNAs targeting ANGPTL4 may be useful for treating a subject with obesity or a liver disease such as NAFLD or NASH, and for decreasing a triglyceride measurement or a liver steatosis measurement in a subject with surprising efficacy, or with decreased toxicity, when compared to another treatment.

### Example 16: Reduction of Liver mRNA Expression by siRNAs Targeting ANGPTL4 in Non-Human Primates

[0425] The activity of three siRNAs targeting human and non-human primate ANGPTL4 were tested individually in cynomolgus monkeys. The siRNAs utilized in this study included ETD01120, ETD01162 GalNAc #23 and ETD01164 GalNAc #23. Each of these siRNAs includes a modified version of a sense strand comprising the sequence of SEQ ID NO: 13977 (derived from SEQ ID NO: 13973), and a modified version of an antisense strand comprising the sequence of SEQ ID NO: 13985 (derived from SEQ ID NO: 13981). ETD01120 includes modification patterns 2S and 3AS. ETD01162 GalNAc #23 includes modification patterns 6S and 6AS. ETD01164 GalNAc #23 includes modification patterns 6S and 8AS. Some additional details of these siRNAs are provided in Table 16.

[0426] Female cynomolgus monkeys (Macaca fascicularis, Cambodian origin, Bioculture Group, Glenmoor, PA, Orient BioResource Center, Alice, TX) were at least 18 months of age and weighed 2.5-4 kg at study start. After arrival, the animals were pair housed in stainless steel cages suspended over flush pans. Fluorescent lighting on a 12 hour on/off cycle was used and the temperature was maintained at 18-29° C. at a target relative humidity of 30-70% with at least 10-15 air exchanges per hour. Animals were acclimated for a period of at least twenty-eight days, during which time they were examined for overall general health and observed daily. All animals were fed a high fat diet (LabDiet 5LOP) starting at least 5 weeks prior to dose administration and were provided with −100 grams per day. Starting at least 5 weeks prior to dose administration and continuing until necropsy, each animal received a high fructose treat at least twice daily (Narvon beverage concentrate, 20 mL twice per day, diluted or undiluted, offered by oral syringe, as a frozen treat, and/or as a hand-held gelatin block. Tap water was provided ad libitum.

[0427] Monkeys (3/group) were administered the vehicle (normal saline) or the siRNA test article once on Day 1 by subcutaneous injection as described in Table 19. In-life, animals were evaluated for clinical signs of toxicity, body weights, and food consumption. Prior to and during the study evaluations for clinical chemistry parameters were performed.

TABLE 19
siRNA Dosing Information

| | | Day of | Dosage | Conc. | Animal |
|---|---|---|---|---|---|
| Group | Treatment | Dose | (mg/kg) | (mg/mL) | No. |
| 1 | vehicle | 1 | 0 | 0 | 1, 3 |
| | | | (vehicle) | | |
| 2 | ETD01162 | 1 | 10 | 100 | 4-6 |
| | GalNAc#23 | | | | |
| 3 | ETD01164 | 1 | 10 | 100 | 7-9 |
| | GalNAc#23 | | | | |
| 4 | ETD01162 | 36 | 4 | 40 | 10, 11 |
| | GalNAc#23 | | | | |
| 5 | ETD01120 | 1 | 10 | 100 | 12-15 |
| 6 | vehicle | 36 | 0 | 0 | 2, 12 |
| | | | (vehicle) | | |

[0428] All animals from each group were necropsied 21 days following test article administration. A ˜2×2×2 mm piece from each liver lobe was collected, placed separately in RNAlater solution, and stored in a 4° C. refrigerator overnight then in a −20° C. freezer until analysis. The levels of ANGPTL4 mRNA in the liver were assessed by RT-qPCR using TaqMan assays for cynomolgus ANGPTL4 (ThermoFisher, assay #Mf01101127 ml) and the cynomolgus housekeeping gene GAPDH (ThermoFisher, assay #Mf04392546_g1). The results are shown in Table 20, Table 21, Table 22 and Table 23. Results indicate that after treatment with siRNAs targeting ANGPTL4 the mean levels of ANGPTL4 mRNA in all liver lobes analyzed were reduced.

TABLE 20
Relative Liver ANGPTL4 mRNA Levels in the Left Lateral Lobe
in Cynomolgus Monkeys After a Single Dose of ANGPTL4 siRNA

| | | | | | Mean |
|---|---|---|---|---|---|
| | | | | Relative | Relative |
| | | Dosage | Animal | ANGPTL4 | ANGPTL4 |
| Group | Treatment | (mg/kg) | # | mRNA level | mRNA level |
| 1 | vehicle | — | 1 | 1.75 | 1.000 |
| 6 | vehicle | | 2 | 1.11 | |
| 1 | vehicle | — | 3 | 0.50 | |
| 6 | vehicle | | 12 | 1.03 | |
| 2 | ETD01162 | 10 | 4 | 0.18 | 0.33 |
| | GalNAc#23 | | 5 | 0.49 | |
| | | | 6 | 0.43 | |
| 3 | ETD01164 | 10 | 7 | 0.65 | 0.41 |
| | GalNAc#23 | | 8 | 0.34 | |
| | | | 9 | 0.30 | |
| 5 | ETD01120 | 10 | 13 | 0.27 | 0.42 |
| | | | 14 | 0.27 | |
| | | | 15 | 1.02 | |
| 4 | ETD01162 | 4 | 10 | 0.60 | 0.76 |
| | GalNAc#23 | | 11 | 0.95 | |

TABLE 21
Relative Liver ANGPTL4 mRNA Levels in the Left Medial Lobe
in Cynomolgus Monkeys After a Single Dose of ANGPTL4 siRNA

| | | | | | Mean |
|---|---|---|---|---|---|
| | | | | Relative | Relative |
| | | Dosage | Animal | ANGPTL4 | ANGPTL4 |
| Group | Treatment | (mg/kg) | # | mRNA level | mRNA level |
| 1 | vehicle | — | 1 | 1.52 | 1.00 |
| 6 | vehicle | | 2 | 1.02 | |
| 1 | vehicle | — | 3 | 0.45 | |
| 6 | vehicle | | 12 | 1.42 | |
| 2 | ETD01162 | 10 | 4 | 0.23 | 0.38 |
| | GalNAc#23 | | 5 | 0.52 | |
| | | | 6 | 0.44 | |
| 3 | ETD01164 | 10 | 7 | 0.75 | 0.44 |
| | GalNAc#23 | | 8 | 0.36 | |
| | | | 9 | 0.32 | |
| 5 | ETD01120 | 10 | 13 | 0.31 | 0.44 |
| | | | 14 | 0.25 | |
| | | | 15 | 1.12 | |
| 4 | ETD01162 | 4 | 10 | 0.62 | 0.76 |
| | GalNAc#23 | | 11 | 0.93 | |

TABLE 22
Relative Liver ANGPTL4 mRNA Levels in the Right Lateral Lobe
in Cynomolgus Monkeys After a Single Dose of ANGPTL4 siRNA

| | | | | | Mean |
|---|---|---|---|---|---|
| | | | | Relative | Relative |
| | | Dosage | Animal | ANGPTL4 | ANGPTL4 |
| Group | Treatment | (mg/kg) | # | mRNA level | mRNA level |
| 1 | vehicle | — | 1 | 1.35 | 1.00 |
| 6 | vehicle | | 2 | 0.80 | |
| 1 | vehicle | — | 3 | ND | |
| 6 | vehicle | | 12 | 0.92 | |
| 2 | ETD01162 | 10 | 4 | 0.23 | 0.30 |
| | GalNAc#23 | | 5 | 0.37 | |
| | | | 6 | 0.32 | |
| 3 | ETD01164 | 10 | 7 | 0.64 | 0.43 |
| | GalNAc#23 | | 8 | 0.34 | |
| | | | 9 | 0.38 | |
| 5 | ETD01120 | 10 | 13 | 0.22 | 0.38 |
| | | | 14 | 0.31 | |
| | | | 15 | 0.80 | |
| 4 | ETD01162 | 4 | 10 | 0.35 | 0.64 |
| | GalNAc#23 | | 11 | 1.16 | |

TABLE 23
Relative Liver ANGPTL4 mRNA Levels in the Right Medial Lobe
in Cynomolgus Monkeys After a Single Dose of ANGPTL4 siRNA

| | | | | | Mean |
|---|---|---|---|---|---|
| | | | | Relative | Relative |
| | | Dosage | Animal | ANGPTL4 | ANGPTL4 |
| Group | Treatment | (mg/kg) | # | mRNA level | mRNA level |
| 1 | vehicle | — | 1 | 1.07 | 1.00 |
| 6 | vehicle | | 2 | 0.65 | |
| 1 | vehicle | — | 3 | 2.29 | |
| 6 | vehicle | | 12 | 0.63 | |
| 2 | ETD01162 | 10 | 4 | 0.16 | 0.20 |
| | GalNAc#23 | | 5 | 0.22 | |
| | | | 6 | 0.22 | |
| 3 | ETD01164 | 10 | 7 | 0.41 | 0.27 |
| | GalNAc#23 | | 8 | 0.23 | |
| | | | 9 | 0.21 | |
| 5 | ETD01120 | 10 | 13 | 0.14 | 0.25 |
| | | | 14 | 0.20 | |
| | | | 15 | 0.55 | |
| 4 | ETD01162 | 4 | 10 | 0.44 | 0.57 |
| | GalNAc#23 | | 11 | 0.74 | |

[0429] Additional experiments are performed in nonhuman primates to determine the efficacy of ETD01178 and ETD01179 to decrease liver ANGPTL4 mRNA levels. Each of these siRNAs also includes a modified version of a sense strand comprising the sequence of SEQ ID NO: 13977 (derived from SEQ ID NO: 13973), and a modified version of an antisense strand comprising the sequence of SEQ ID NO: 13985 (derived from SEQ ID NO: 13981). ETD01178 includes modification patterns 6S and 6AS. ETD01179 includes modification patterns 8S and 6AS. Administration of these siRNAs is expected to also reduce ANGPTL4 mRNA measurements in liver samples, relative to baseline ANGPTL4 mRNA measurements.

### Example 17: GalNAc Ligands for Hepatocyte Targeting of Oligonucleotides

[0430] Without limiting the disclosure to these individual methods, there are at least two general methods for attachment of multivalent N-acetylgalactosamine (GalNAc) ligands to oligonucleotides: solid or solution-phase conjugations. GalNAc ligands may be attached to solid phase resin for 3′ conjugation or at the 5′ terminus using GalNAc phosphoramidite reagents. GalNAc phosphoramidites may be coupled on solid phase as for other nucleosides in the oligonucleotide sequence at any position in the sequence. A non-limiting example of a phosphoramidite reagent for GalNAc conjugation to a 5′ end oligonucleotide is shown in Table 24.

TABLE 24
GalNAc Conjugation Reagent

| Type of | |
|---|---|
| conjugation | Structure |
| Solid phase 5′ attachment phosphoramidite | [chemical structure] |

[0431] The following includes examples of synthesis reactions used to create a GalNAc moiety:

Scheme for the preparation of NAcegal-Linker-TMSOTf

[chemical structure]

### General Procedure for Preparation of Compound 2A

[chemical structure]

[0433] To a solution of Compound 1A (500 g, 4.76 mol, 476 mL) in 2-Methyl-THF (2.00 L) is added CbzCl (406 g, 2.38 mol, 338 mL) in 2-Methyl-THF (750 mL) dropwise at 0° C. The mixture is stirred at 25° C. for 2 hrs under N2 atmosphere. TLC (DCM:MeOH=20:1, PMA) may indicate CbzCl is consumed completely and one new spot (Rf=0.43) formed. The reaction mixture is added HCl/EtOAc (1 N, 180 mL) and stirred for 30 mins, white solid is removed by filtration through celite, the filtrate is concentrated under vacuum to give Compound 2A (540 g, 2.26 mol, 47.5% yield) as a pale yellow oil and used into the next step without further purification. 1H NMR: δ 7.28-7.41 (m, 5H), 5.55 (br s, 1H), 5.01-5.22 (m, 2H), 3.63-3.80 (m, 2H), 3.46-3.59 (m, 4H), 3.29-3.44 (m, 2H), 2.83-3.02 (m, 1H).

### General Procedure for Preparation of Compound 4A

[chemical structure]

[0435] To a solution of Compound 3A (1.00 kg, 4.64 mol, HCl) in pyridine (5.00 L) is added acetyl acetate (4.73 kg, 46.4 mol, 4.34 L) dropwise at 0° C. under N₂ atmosphere. The mixture is stirred at 25° C. for 16 hrs under N₂ atmosphere. TLC (DCM:MeOH=20:1, PMA) indicated Compound 3A is consumed completely and two new spots (R_{f}=0.35) formed. The reaction mixture is added to cold water (30.0 L) and stirred at 0° C. for 0.5 hr, white solid formed, filtered and dried to give Compound 4A (1.55 kg, 3.98 mol, 85.8% yield) as a white solid and used in the next step without further purification. ¹H NMR: δ 7.90 (d, J=9.29 Hz, 1H), 5.64 (d, J=8.78 Hz, 1H), 5.26 (d, J=3.01 Hz, 1H), 5.06 (dd, J=11.29, 3.26 Hz, 1H), 4.22 (t, J=6.15 Hz, 1H), 3.95-4.16 (m, 3H), 2.12 (s, 3H), 2.03 (s, 3H), 1.99 (s, 3H), 1.90 (s, 3H), 1.78 (s, 3H).

### General Procedure for Preparation of Compound 5A

[chemical structure]

[0437] To a solution of Compound 4A (300 g, 771 mmol) in DCE (1.50 L) is added TMSOTf (257 g, 1.16 mol, 209 mL) and stirred for 2 hrs at 60° C., and then stirred for 1 hr at 25° C. Compound 2A (203 g, 848 mmol) is dissolved in DCE (1.50 L) and added 4 Å powder molecular sieves (150 g) stirring for 30 mins under N₂ atmosphere. Then the solution of Compound 4A in DCE is added dropwise to the mixture at 0° C. The mixture is stirred at 25° C. for 16 hrs under N₂ atmosphere. TLC (DCM:MeOH=25:1, PMA) indicated Compound 4A is consumed completely and new spot (R_{f}=0.24) formed. The reaction mixture is filtered and washed with sat. NaHCO₃ (2.00 L), water (2.00 L) and sat. brine (2.00 L). The organic layer is dried over anhydrous Na₂SO4, filtered and concentrated under reduced pressure to give a residue. The residue is triturated with 2-Me-THE/heptane (5/3, v/v, 1.80 L) for 2 hrs, filtered and dried to give Compound 5A (225 g, 389 mmol, 50.3% yield, 98.4% purity) as a white solid. ¹H NMR: δ 7.81 (d, J=9.29 Hz, 1H), 7.20-7.42 (m, 6H), 5.21 (d, J=3.26 Hz, 1H), 4.92-5.05 (m, 3H), 4.55 (d, J 8.28 Hz, 1H), 3.98-4.07 (m, 3H), 3.82-3.93 (m, 1H), 3.71-3.81 (m, 1H), 3.55-3.62 (m, 1H), 3.43-3.53 (m, 2H), 3.37-3.43 (m, 2H), 3.14 (q, J=5.77 Hz, 2H), 2.10 (s, 3H), 1.99 (s, 3H), 1.89 (s, 3H), 1.77 (s, 3H).

### General Procedure for Preparation of NAcegal-Linker-Tosylate Salt

[chemical structure]

[0439] To a solution of Compound 5A (200 g, 352 mmol) in THF (1.0 L) is added dry Pd/C (15.0 g, 10% purity) and TsOH (60.6 g, 352 mmol) under N₂ atmosphere. The suspension is degassed under vacuum and purged with H₂ several times. The mixture is stirred at 25° C. for 3 hrs under H₂ (45 psi) atmosphere. TLC (DCM:MeOH=10:1, PMA) indicated Compound 5A is consumed completely and one new spot (R_{f}=0.04) is formed. The reaction mixture is filtered and concentrated (≤40° C.) under reduced pressure to give a residue. Diluted with anhydrous DCM (500 mL, dried overnight with 4 Å molecular sieves (dried at 300° C. for 12 hrs)) and concentrate to give a residue and run Karl Fisher (KF) to check for water content. This is repeated 3 times with anhydrous DCM (500 mL) dilutions and concentration to give NAcegal-Linker-TMSOTf (205 g, 95.8% yield, TsOH salt) as a foamy white solid. ¹H NMR: δ 7.91 (d, J=9.03 Hz, 1H), 7.53-7.86 (m, 2H), 7.49 (d, J=8.03 Hz, 2H), 7.13 (d, J=8.03 Hz, 2H), 5.22 (d, J=3.26 Hz, 1H), 4.98 (dd, J=11.29, 3.26 Hz, 1H), 4.57 (d, J=8.53 Hz, 1H), 3.99-4.05 (m, 3H), 3.87-3.94 (m, 1H), 3.79-3.85 (m, 1H), 3.51-3.62 (m, 5H), 2.96 (br t, J=5.14 Hz, 2H), 2.29 (s, 3H), 2.10 (s, 3H), 2.00 (s, 3H), 1.89 (s, 3H), 1.78 (s, 3H).

### Scheme for the Preparation of TRIS-PEG2-CBZ

[chemical structure]

[chemical structure]

### General Procedure for Preparation of Compound 5B

[chemical structure]

[0442] To a solution of Compound 4B (400 g, 1.67 mol, 1.00 eq) and NaOH (10 M, 16.7 mL, 0.10 eq) in THE (2.00 L) is added Compound 4B_2 (1.07 kg, 8.36 mol, 1.20 L, 5.00 eq), the mixture is stirred at 30° C. for 2 hrs. LCMS showed the desired MS is given. Five batches of solution are combined to one batch, then the mixture is diluted with water (6.00 L), extracted with ethyl acetate (3.00 L*3), the combined organic layer is washed with brine (3.00 L), dried over Na₂SO₄, filtered and concentrated under vacuum. The crude is purified by column chromatography (SiO₂, petroleum ether:ethyl acetate=100:1-10:1, Rf=0.5) to give Compound 5B (2.36 kg, 6.43 mol, 76.9% yield) as light yellow oil. HNMR: δ 7.31-7.36 (m, 5H), 5.38 (s, 1H), 5.11-5.16 (m, 2H), 3.75 (t, J=6.4 Hz), 3.54-3.62 (m, 6H), 3.39 (d, J=5.2 Hz), 2.61 (t, J=6.0 Hz).

### General procedure for preparation of 3-oxo-1-phenyl-2,7,10-trioxa-4-azatridecan-13-oic acid (Compound 2B below)

[chemical structure]

[0444] To a solution of Compound 5B (741 g, 2.02 mol, 1.00 eq) in DCM (2.80 L) is added TFA (1.43 kg, 12.5 mol, 928 mL, 6.22 eq), the mixture is stirred at 25° C. for 3 hrs. LCMS showed the desired MS is given. The mixture is diluted with DCM (5.00 L), washed with water (3.00 L*3), brine (2.00 L), the combined organic layer is dried over Na₂SO₄, filtered and concentrated under vacuum to give Compound 2B (1800 g, crude) as light yellow oil. HNMR: δ 9.46 (s, 5H), 7.27-7.34 (m, 5H), 6.50-6.65 (m, 1H), 5.71 (s, 1H), 5.10-5.15 (m, 2H), 3.68-3.70 (m, 14H), 3.58-3.61 (m, 6H), 3.39 (s, 2H), 2.55 (s, 6H), 2.44 (s, 2H).

### General Procedure for Preparation of Compound 3B

[chemical structure]

[0446] To a solution of Compound 2B (375 g, 999 mmol, 83.0% purity, 1.00 eq) in DCM (1.80 L) is added HATU (570 g, 1.50 mol, 1.50 eq) and DIEA (258 g, 2.00 mol, 348 mL, 2.00 eq) at 0° C., the mixture is stirred at 0° C. for 30 min, then Compound 1B (606 g, 1.20 mol, 1.20 eq) is added, the mixture is stirred at 25° C. for 1 hr. LCMS showed desired MS is given. The mixture is combined to one batch, then the mixture is diluted with DCM (5.00 L), washed with 1 N HCl aqueous solution (2.00 L*2), then the organic layer is washed with saturated Na₂CO₃ aqueous solution (2.00 L*2) and brine (2.00 L), the organic layer is dried over Na₂SO₄, filtered and concentrated under vacuum to give Compound 3B (3.88 kg, crude) as yellow oil.

General procedure for preparation of TRIS-PEG2-CBZ.

[chemical structure]

[0447] A solution of Compound 3B (775 g, 487 mmol, 50.3% purity, 1.00 eq) in HCl/dioxane (4 M, 2.91 L, 23.8 eq) is stirred at 25° C. for 2 hrs. LCMS showed the desired MS is given. The mixture is concentrated under vacuum to give a residue. Then the combined residue is diluted with DCM (5.00 L), adjusted to pH=8 with 2.5 M NaOH aqueous solution, and separated. The aqueous phase is extracted with DCM (3.00 L) again, then the aqueous solution is adjusted to pH=3 with 1 N HCl aqueous solution, then extracted with DCM (5.00 L*2), the combined organic layer is washed with brine (3.00 L), dried over Na₂SO₄, filtered and concentrated under vacuum. The crude is purified by column chromatography (SiO₂, DCM:MeOH=0:1-12:1, 0.1% HOAc, R_{f}=0.4). The residue is diluted with DCM (5.00 L), adjusted to pH=8 with 2.5 M NaOH aqueous solution, separated, the aqueous solution is extracted with DCM (3.00 L) again, then the aqueous solution is adjusted to pH=3 with 6 N HCl aqueous solution, extracted with DCM:MeOH=10:1 (5.00 L*2), the combined organic layer is washed with brine (2.00 L), dried over Na₂SO₄, filtered and concentrated under vacuum to give a residue. Then the residue is diluted with MeCN (5.00 L), concentrated under vacuum, repeat this procedure twice to remove water to give TRIS-PEG2-CBZ (1.25 kg, 1.91 mol, 78.1% yield, 95.8% purity) as light yellow oil. ¹HNMR: 400 MHz, MeOD, δ 7.30-7.35 (5H), 5.07 (s, 2H), 3.65-3.70 (m, 16H), 3.59 (s, 4H), 3.45 (t, J=5.6 Hz), 2.51 (t, J=6.0 Hz), 2.43 (t, 6.4 Hz). Scheme for the preparation of TriNGal-TRIS-Peg2-Phosph 8c

[chemical structure]

[chemical structure]

[chemical structure]

### General Procedure for Preparation of Compound 3C

[chemical structure]

[0449] To a solution of Compound 1C (155 g, 245 mmol, 1.00 eq) in ACN (1500 mL) is added TBTU (260 g, 811 mmol, 3.30 eq), DIEA (209 g, 1.62 mol, 282 mL, 6.60 eq) and Compound 2C (492 g, 811 mmol, 3.30 eq, TsOH) at 0° C., the mixture is stirred at 15° C. for 16 hrs. LCMS showed the desired MS is given. The mixture is concentrated under vacuum to give a residue, then the mixture is diluted with DCM (2000 mL), washed with 1 N HCl aqueous solution (700 mL*2), then saturated NaHCO₃ aqueous solution (700 mL*2) and concentrated under vacuum. The crude is purified by column chromatography to give Compound 3C (304 g, 155 mmol, 63.1% yield, 96.0% purity) as a yellow solid.

### General Procedure for Preparation of Compound 4C

[chemical structure]

[0451] Two batches solution of Compound 3C (55.0 g, 29.2 mmol, 1.00 eq) in MeOH (1600 mL) is added Pd/C (6.60 g, 19.1 mmol, 10.0% purity) and TFA (3.34 g, 29.2 mmol, 2.17 mL, 1.00 eq), the mixture is degassed under vacuum and purged with H₂. The mixture is stirred under H₂ (15 psi) at 15° C. for 2 hours. LCMS showed the desired MS is given. The mixture is filtered and the filtrate is concentrated under vacuum to give Compound 4C (106 g, 54.8 mmol, 93.7% yield, 96.2% purity, TFA) as a white solid.

### General Procedure for Preparation of Compound 5C

[chemical structure]

[0453] Two batches in parallel. To a solution of EDCI (28.8 g, 150 mmol, 1.00 eq) in DCM (125 mL) is added compound 4a (25.0 g, 150 mmol, 1.00 eq) dropwise at 0° C., then the mixture is added to compound 4 (25.0 g, 150 mmol, 1.00 eq) in DCM (125 mL) at 0° C., then the mixture is stirred at 25° C. for 1 hr. TLC (Petroleum ether:Ethyl acetate=3:1, R_{f}=0.45) showed the reactant is consumed and one new spot is formed. The reaction mixture is diluted with DCM (100 mL) then washed with aq.NaHCO₃ (250 mL*1) and brine (250 mL), dried over Na₂SO₄, filtered and concentrated under reduced pressure to give a residue. The residue is purified by column chromatography (SiO₂, Petroleum ether:Ethyl acetate=100:1 to 3:1), TLC (SiO₂, Petroleum ether:Ethyl acetate=3:1), R_{f}=0.45, then concentrated under reduced pressure to give a residue. Compound 5C (57.0 g, 176 mmol, 58.4% yield, 96.9% purity) is obtained as colorless oil and confirmed ¹HNMR: EW33072-2-P1A, 400 MHz, DMSO δ 9.21 (s, 1H), 7.07-7.09 (m, 2H), 6.67-6.70 (m, 2H), 3.02-3.04 (m, 2H), 2.86-2.90 (m, 2H)

### General Procedure for Preparation of Compound 6

[chemical structure]

[0455] To a mixture of compound 3 (79.0 g, 41.0 mmol, 96.4% purity, 1.00 eq, TFA) and compound 6C (14.2 g, 43.8 mmol, 96.9% purity, 1.07 eq) in DCM (800 mL) is added TEA (16.6 g, 164 mmol, 22.8 mL, 4.00 eq) dropwise at 0° C., the mixture is stirred at 15° C. for 16 hrs. LCMS (EW33072-12-P1B, Rt=0.844 min) showed the desired mass is detected. The reaction mixture is diluted with DCM (400 mL) and washed with aq.NaHCO₃ (400 mL*1) and brine (400 mL*1), then the mixture is diluted with DCM (2.00 L) and washed with 0.7 M Na₂CO₃ (1000 mL*3) and brine (800 mL*3), dried over Na₂SO₄, filtered and concentrated under reduced pressure to give a residue. The residue is used to next step directly without purification. Compound 6 (80.0 g, crude) is obtained as white solid and confirmed via ¹HNMR: EW33072-12-P1A, 400 MHz, MeOD δ 7.02-7.04 (m, 2H), 6.68-6.70 (m, 2H), 5.34-5.35 (s, 3H), 5.07-5.08 (d, J=4.00 Hz, 3H), 4.62-4.64 (d, J=8.00 Hz, 3H), 3.71-4.16 (m, 16H), 3.31-3.70 (m, 44H), 2.80-2.83 (m, 2H), 2.68 (m, 2H), 2.46-2.47 (m, 10H), 2.14 (s, 9H), 2.03 (s, 9H), 1.94-1.95 (d, J=4.00 Hz, 18H).

### General Procedure for Preparation of TriGNal-TRIS-Peg2-Phosph 8c

[chemical structure]

[0457] Two batches are synthesized in parallel. To a solution of compound 6C (40.0 g, 21.1 mmol, 1.00 eq in DCM (600 mL) is added diisopropylammonium tetrazolide (3.62 g, 21.1 mmol, 1.00 eq) and compound 7c (6.37 g, 21.1 mmol, 6.71 mL, 1.00 eq) in DCM (8.00 mL) drop-wise, the mixture is stirred at 30° C. for 1 hr, then added compound 7c (3.18 g, 10.6 mmol, 3.35 mL, 0.50 eq) in DCM (8.00 mL) drop-wise, the mixture is stirred at 30° C. for 30 mins, then added compound 7c (3.18 g, 10.6 mmol, 3.35 mL, 0.50 eq) in DCM (8.00 mL) drop-wise, the mixture is stirred at 30° C. for 1.5 hrs. LCMS (EW33072-17-P1C1, Rt=0.921 min) showed the desired MS+1 is detected. LCMS (EW33072-17-P1C2, Rt=0.919 min) showed the desired MS+1 is detected. Two batches are combined for work-up. The mixture is diluted with DCM (1.20 L), washed with saturated NaHCO₃ aqueous solution (1.60 L*2), 3% DMF in H₂O (1.60 L*2), H₂O (1.60 L*3), brine (1.60 L), dried over Na₂SO₄, filtered and concentrated under reduced pressure to give a residue. The residue is purified by column chromatography (SiO₂, DCM:MeOH:TEA=100:3:2) TLC (SiO₂, DCM:MeOH=10:1, R_{f}=0.45), then concentrated under reduced pressure to give a residue. Compound 8C (76.0 g, 34.8 mmol, 82.5% yield, 96.0% purity) is obtained as white solid and confirmed via ¹HNMR: EW33072-19-P1C, 400 MHz, MeOD δ 7.13-7.15 (d, J=8.50 Hz, 2H), 6.95-6.97 (dd, J=8.38, 1.13 Hz, 2H), 5.34 (d, J=2.88 Hz, 3H), 0.09 (dd, J=11.26, 3.38 Hz, 3H), 4.64 (d, J=8.50 Hz, 3H), 3.99-4.20 (m, 12H), 3.88-3.98 (m, 5H), 3.66-3.83 (m, 20H), 3.51-3.65 (m, 17H), 3.33-3.50 (m, 9H), 2.87 (t, J=7.63 Hz, 2H), 2.76 (t, J=5.94 Hz, 2H), 2.42-2.50 (m, 10H), 2.14 (s, 9H), 2.03 (s, 9H), 1.94-1.95 (d, J=6.13 Hz, 18H), 1.24-1.26 (d, J=6.75 Hz, 6H), 1.18-1.20 (d, J=6.75 Hz, 6H)

### Example 18: Modification Motif 1

[0458] An example ANGPTL4 siRNA includes a combination of the following modifications:
[0459] Position 9 (from 5′ to 3′) of the sense strand is 2′ F.
[0460] If position 9 is a pyrimidine then all purines in the Sense Strand are 2′OMe, and 1-5 pyrimidines between positions 5 and 11 are 2′ F provided that there are never three 2′F modifications in a row.
[0461] If position 9 is a purine then all pyrimidines in the Sense Strand are 2′OMe, and 1-5 purines between positions 5 and 11 are 2′ F provided that there are never three 2′F modifications in a row.
[0462] Antisense strand odd-numbered positions are 2′OMe and even-numbered positions are a mixture of 2′ F and 2′ deoxy.

### Example 19: Modification Motif 2

[0463] An example ANGPTL4 siRNA includes a combination of the following modifications:
[0464] Position 9 (from 5′ to 3′) of the sense strand is 2′ deoxy.
[0465] Sense strand positions 5, 7 and 8 are 2′ F.
[0466] All pyrimidines in positions 10-21 are 2′ OMe, and purines are a mixture of 2′ OMe and 2′ F. Alternatively, all purines in positions 10-21 are 2′ OMe and all pyrimidines in positions 10-21 are a mixture of 2′ OMe and 2′ F.
[0467] Antisense strand odd-numbered positions are 2′OMe and even-numbered positions are a mixture of 2′ F and 2′ deoxy.

### Example 20: Screening siRNAs Targeting Human ANGPTL4 in Mice Transfected with AAV8-TBG-h-ANGPTL4

[0468] Several siRNAs targeting human ANGPTL4, namely ETD01179, ETD01656, ETD01657, ETD01658 and ETD01659 were tested for activity in mice following transfection with an adeno-associated viral vector. The siRNAs were attached to the GalNAc ligand ETL1. The siRNA sequences are shown in Table 25A-25B, where Nf is a 2′ fluoro-modified nucleoside, n is a 2′ O-methyl modified nucleoside, and “s” is a phosphorothioate linkage.

TABLE 25A
Example siRNA Sequences

| | Sense Strand Sequence (5′-3′) with | |
|---|---|---|
| ETD# | GalNAc moiety | Antisense Strand Sequence (5′-3′) |
| ETD01179 | ETL1]csasgagUfUfCfUfuggaauaaaasusu | usUfsuUfaUfuCfcAfaGfaAfcUfcUfgsusu |
| ETD01656 | [ETL1]sggacAfGfuAfAfuucagaggcasusu | usGfscCfuCfuGfaAfuUfaCfuGfuCfcsusu |
| ETD01657 | ETL1]suggaGfAfaGfGfuGfcauagcaasusu | usUfsgCfuAfuGfcAfcCfuUfcUfcCfasusu |
| ETD01658 | [ETL1]saccaccAfuGfuugauccagasusu | usCfsuGfgAfuCfaAfcAfuGfgUfgGfususu |
| ETD01659 | ETL1\|sugcugUfUfgUfgUfguaggucasusu | usGfsaCfcUfaCfaCfaCfaAfcAfgCfasusu |

TABLE 25B
Example siRNA Sequences

| ETD# | Sense Strand SEQ ID NO: | Antisense Strand SEQ ID NO: |
|---|---|---|
| ETD01179 | 14299 | 14298 |
| ETD01656 | 14300 | 14304 |
| ETD01657 | 14301 | 14305 |
| ETD01658 | 14302 | 14306 |
| ETD01659 | 14303 | 14307 |

[0469] Six to eight week old female mice (C57Bl/6) were injected with 10 uL of a recombinant adeno-associated virus 8 (AAV8) vector (1.8×10E13 genome copies/mL) by the retroorbital route. The recombinant AAV8 contained positions 29-1870 of the human ANGPTL4 sequence (NM_139314) under the control of the human thyroxine binding globulin promoter in an AAV2 backbone packaged in AAV8 capsid (AAV8-TBG-h-ANGPTL4). On Day 14 after infection, serum was collected and the level of human ANGPTL4 protein in each mouse was measured using an AlphaLISA immunoassay (PerkinElmer AL3017) according to the recommended protocols provided by the manufacturer. Briefly, standard analyte (recombinant human ANGPTL4 encoding residues Gly26-Ser406) and serum samples were prepared in 1× AlphaLISA Assay Buffer (PerkinElmer AL000C). For each assay, 5 μL of prepared standard analyte or diluted sample were added to a 96-well white ½ Area OptiPlate (PerkinElmer 6002290) followed by the addition of 10 μL of Acceptor bead mix. Then the plate was sealed with TopSeal A-PLUS (PerkinElmer 6050185) and incubated for 30 minutes at room temperature. Next, 10 L of biotinylated antibody was added to each well of the plate. The plate was sealed and incubated for 60 minutes at room temperature. Afterwards, 25 μL of streptavidin Donor beads were added in the dark to prevent photobleaching. The plate was sealed, covered with foil, and incubated at room temperature for 30 minutes prior to measuring AlphaLISA signal. All Alpha assays were measured on the Alpha-enabled EnVision multilabel plate reader using the 640as mirror module (#444) and the M570w emission filter (#244). Standard Alpha measurement settings were used: excitation wavelength at 680 nm was used to excite Donor beads and emission wavelength at 615 nm measured as Alpha signal; total measurement time 550 ms and excitation time 180 ms were used. A standard curve was generated by plotting the Alpha signal counts versus the concentration of analyte using GraphPad Prism version 9 for macOS (GraphPad Software). The curve was fit according to a nonlinear regression using the 4-parameter logistic equation (sigmoidal dose-response curve with variable slope) and a 1/Y2 data weighting (Prism version 9, Software MacKiev).

[0470] Mice were allocated into groups (n=4) such that the groups had similar serum levels of ANGPTL4 protein and then given a subcutaneous injection of a single 100 μg dose of a GalNAc-conjugated siRNA or PBS as vehicle control. On Days 0, 3, 7 and 14 after injection, serum was collected to assess serum ANGPTL4 protein concentrations by AlphaLISA using the methods described above. The ANGPTL4 serum concentration at each timepoint was made relative to the level of ANGPTL4 protein in the Day 0 sample for each individual mouse. The results are shown in Table 26. Mice injected with ETD01179 had the greatest reduction in serum ANGPTL4 of the siRNAs tested, with lower levels on Day 14 and Day 14 than on Day 3 relative to Day 0. Mice injected ETD01656, ETD01657, EETD01658 and ETD01659 did not as large of a reduction in ANGPTL4 protein.

TABLE 26
Relative Mean Serum Human ANGPTL4
Levels in AAV8-TBG-h- ANGPTL4 Mice

| | | | | Mean serum human ANGPTL4 | | | |
|---|---|---|---|---|---|---|---|
| | | | Dose | protein (Relative to Day 0) | | | |
| Group | n | Treatment | (μg) | Day 0 | Day 3 | Day 7 | Day 14 |
| 1 | 4 | PBS | 0 | 1.00 | 0.85 | 0.67 | 0.60 |
| 2 | 4 | ETD01179 | 100 | 1.00 | 0.20 | 0.04 | 0.06 |
| 3 | 4 | ETD01656 | 100 | 1.00 | 0.72 | 0.68 | 0.88 |
| 4 | 4 | ETD01657 | 100 | 1.00 | 1.00 | 1.30 | 0.96 |
| 5 | 4 | ETD01658 | 100 | 1.00 | 0.88 | 0.74 | 0.92 |
| 6 | 4 | ETD01659 | 100 | 1.00 | 0.94 | 0.60 | 0.52 |

[0471] Mice were sacrificed on Day 14 and a liver sample from each was collected and placed in RNAlater (ThermoFisher Catalog #AM7020) until processing. Total liver RNA was prepared by homogenizing the liver tissue in homogenization buffer (Maxwell RSC simplyRNA Tissue Kit) using a Percellys 24 tissue homogenizer (Bertin Instruments) set at 5000 rpm for two 10 second cycles. Total RNA from the lysate was purified on a Maxwell RSC 48 platform (Promega Corporation) according to the manufacturer's recommendations. Preparation of cDNA was performed using Quanta qScript cDNA SuperMix (VWR, Catalog #95048-500) according to the manufacturer's instructions. The relative levels of liver ANGPTL4 mRNA were assessed by RT-qPCR using TaqMan assays for human ANGPTL4 (ThermoFisher, assay #Hs01101127_m1) and the mouse housekeeping gene PPIA (ThermoFisher, assay #Mm02342430_g1) and PerfeCTa® qPCR FastMix®, Low ROX™ (VWR, Catalog #101419-222). Data were normalized to the level in animals receiving PBS. Results are shown in Table 27. Mice injected with ETD01179 was the most active, having substantially lower levels in mean liver human ANGPTL4 mRNA on Day 14 relative to mice receiving PBS.

TABLE 27
Relative Human ANGPTL4 mRNA Levels in
Livers of AAV8-TBG-h- ANGPTL4 Mice

| | | | Dose | Mean human ANGPTL4 mRNA |
|---|---|---|---|---|
| Group | n | Treatment | (μg) | (Relative to Group 1, Day 14) |
| 1 | 4 | PBS | 0 | 1.00 |
| 2 | 4 | ETD01179 | 100 | 0.26 |
| 3 | 4 | ETD01656 | 100 | 0.63 |
| 4 | 4 | ETD01657 | 100 | 1.21 |
| 5 | 4 | ETD01658 | 100 | 0.86 |
| 6 | 4 | ETD01659 | 100 | 0.86 |

### Example 21. Screening Additional siRNAs Targeting Human ANGPTL4 and Alternatively Modified Versions of ETD01179 in Mice Transfected with AAV8-TBG-h-ANGPTL4

[0472] Several siRNAs targeting human ANGPTL4 were tested for activity in mice following transfection with an adeno-associated viral vector. These were siRNAs with alternative modifications to siRNA ETD01179 as well as an siRNA with a different target sequence, ETD01782. The siRNAs were attached to the GalNAc ligand ETL1 at the 5′ end of the sense strand. The siRNA sequences are shown in Table 28A-28B, where Nf is a 2′ fluoro-modified nucleoside, n is a 2′ O-methyl modified nucleoside, and “s” is a phosphorothioate linkage.

TABLE 28A
siRNA Sequences

| ETD# | Sense Strand Sequence (5′-3′) with GalNAc moiety | Antisense Strand Sequence (5′-3′) |
|---|---|---|
| ETD01179 | [ETL1]csasgagUfUfCfUfuggaauaaaasusu | usUfsuUfaUfuCfcAfaGfaAfcUfcUfgsusu |
| ETD01776 | [ETL1]scagagUfUfCfUfuggaauaaaasusu | usUfsuUfaUfuCfcAfaGfaAfcUfcUfgsusu |
| ETD01768 | [ETL1]scagagUfUfCfUfuggaauaaaasusu | usUfsuuaUfuCfcAfaGfaAfcUfcUfgsusu |
| ETD01769 | [ETL1]scagagUfUfCfUfuggaauaaaasusu | usUfsusUfaUfuCfcAfaGfaAfcUfcUfgsusu |
| ETD01770 | [ETL1]scagagUfUfCfUfuggaauaaaasusu | usUfsuUfaUfuccAfaGfaAfcUfcUfgsusu |
| ETD01771 | [ETL1]scagagUfUfCfUfuggaauaaaasusu | usUfsuUfaUfuccaaGfaAfcUfcUfgsusu |
| ETD01772 | [ETL1]scagagUfUfCfUfudGgaauaaaasusu | usUfsuUfaUfuCfcAfaGfaAfcUfcUfgsusu |
| ETD01782 | [ETL1]suaUfgCfuCfadGacucuagagasusu | usCfsuCfuAfgAfgUfcUfgAfgCfaUfasusu |

TABLE 28B
Example siRNA Sequences

| ETD# | Sense Strand SEQ ID NO: | Antisense Strand SEQ ID NO: |
|---|---|---|
| ETD01179 | 14299 | 14298 |
| ETD01776 | 14308 | 14315 |
| ETD01768 | 14309 | 14316 |
| ETD01769 | 14310 | 14317 |
| ETD01770 | 14311 | 14318 |
| ETD01771 | 14312 | 14319 |
| ETD01772 | 14313 | 14320 |
| ETD01782 | 14314 | 14321 |

[0473] Six to eight week old female mice (C57Bl/6) were injected with 10 uL of a recombinant adeno-associated virus 8 (AAV8) vector (1.8×10E13 genome copies/mL) by the retroorbital route. The recombinant AAV8 contained positions 29-1870 of the human ANGPTL4 sequence (NM_139314) under the control of the human thyroxine binding globulin promoter in an AAV2 backbone packaged in AAV8 capsid (AAV8-TBG-h-ANGPTL4). On Day 14 after infection, serum was collected and the level of human ANGPTL4 protein in each mouse was measured using an AlphaLISA immunoassay (PerkinElmer AL3017) according to the recommended protocols provided by the manufacturer. Briefly, standard analyte (recombinant human ANGPTL4 encoding residues Gly26-Ser406) and serum samples were prepared in 1× AlphaLISA Assay Buffer (PerkinElmer AL000C). For each assay, 5 μL of prepared standard analyte or diluted sample were added to a 96-well white ½ Area OptiPlate (PerkinElmer 6002290) followed by the addition of 10 μL of Acceptor bead mix. Then the plate was sealed with TopSeal A-PLUS (PerkinElmer 6050185) and incubated for 30 minutes at room temperature. Next, 10 L of biotinylated antibody was added to each well of the plate. The plate was sealed and incubated for 60 minutes at room temperature. Afterwards, 25 μL of streptavidin Donor beads were added in the dark to prevent photobleaching. The plate was sealed, covered with foil, and incubated at room temperature for 30 minutes prior to measuring AlphaLISA signal. All Alpha assays were measured on the Alpha-enabled EnVision multilabel plate reader using the 640as mirror module (#444) and the M570w emission filter (#244). Standard Alpha measurement settings were used: excitation wavelength at 680 nm was used to excite Donor beads and emission wavelength at 615 nm measured as Alpha signal; total measurement time 550 ms and excitation time 180 ms were used. A standard curve was generated by plotting the Alpha signal counts versus the concentration of analyte using GraphPad Prism version 9 for macOS (GraphPad Software). The curve was fit according to a nonlinear regression using the 4-parameter logistic equation (sigmoidal dose-response curve with variable slope) and a 1/Y2 data weighting (Prism version 9, Software MacKiev).

[0474] Mice were allocated into groups (n=4) such that the groups had similar serum levels of ANGPTL4 protein and then given a subcutaneous injection of a single 60 μg dose of a GalNAc-conjugated siRNA or PBS as vehicle control. On Days 0, 4 and 10 after injection, serum was collected to assess serum ANGPTL4 protein concentrations by AlphaLISA using the methods described above. The ANGPTL4 serum concentration at each timepoint was made relative to the level of ANGPTL4 protein in the Day 0 sample for each individual mouse. The results are shown in Table 29. Mice injected with an alternatively modified versions of ETD01179, namely ETD01776, ETD01768, ETD01769, ETD01770, ETD01771 and ETD01772, had greater reductions in serum ANGPTL4 protein on Days 3 and 10 relative to Day 0 than mice injected with ETD01179. Mice injected with the new siRNA sequence, ETD01782, had reduced ANGPTL4 protein compared to the mice receiving the PBS control.

TABLE 29
Relative Mean Serum Human ANGPTL4
Levels in AAV8-TBG-h-ANGPTL4 Mice

| | | | | Mean serum human ANGPTL4 | | |
|---|---|---|---|---|---|---|
| | | | Dose | protein (Relative to Day 0) | | |
| Group | n | Treatment | (μg) | Day 0 | Day 4 | Day 10 |
| 1 | 4 | PBS | 0 | 1.00 | 0.89 | 0.78 |
| 2 | 4 | ETD01179 | 40 | 1.00 | 0.78 | 0.51 |
| 3 | 4 | ETD01776 | 40 | 1.00 | 0.54 | 0.29 |
| 4 | 4 | ETD01768 | 40 | 1.00 | 0.68 | 0.35 |
| 5 | 4 | ETD01769 | 40 | 1.00 | 0.69 | 0.30 |
| 6 | 4 | ETD01770 | 40 | 1.00 | 0.51 | 0.27 |
| 7 | 4 | ETD01771 | 40 | 1.00 | 0.35 | 0.29 |
| 8 | 4 | ETD01772 | 40 | 1.00 | 0.65 | 0.33 |
| 9 | 4 | ETD01782 | 40 | 1.00 | 0.70 | 0.54 |

[0475] Mice were sacrificed on Day 10 and a liver sample from each was collected and placed in RNAlater (ThermoFisher Catalog #AM7020) until processing. Total liver RNA was prepared by homogenizing the liver tissue in homogenization buffer (Maxwell RSC simplyRNA Tissue Kit) using a Percellys 24 tissue homogenizer (Bertin Instruments) set at 5000 rpm for two 10 second cycles. Total RNA from the lysate was purified on a Maxwell RSC 48 platform (Promega Corporation) according to the manufacturer's recommendations. Preparation of cDNA was performed using Quanta qScript cDNA SuperMix (VWR, Catalog #95048-500) according to the manufacturer's instructions. The relative levels of liver ANGPTL4 mRNA were assessed by RT-qPCR using TaqMan assays for human ANGPTL4 (ThermoFisher, assay #Hs01101127_m1) and the mouse housekeeping gene PPIA (ThermoFisher, assay #Mm02342430_g1) and PerfeCTa® qPCR FastMix®, Low ROX™ (VWR, Catalog #101419-222). Data were normalized to the level in animals receiving PBS. Results are shown in Table 30. Mice injected with an alternatively modified versions of ETD01179, namely ETD01776, ETD01768, ETD01769, ETD01770, and ETD01771, had substantially lower levels in mean liver human ANGPTL4 mRNA on Day 10 relative to mice receiving ETD01179. Mice injected with the new siRNA sequence, ETD01782, had substantially lower levels in mean liver human ANGPTL4 mRNA on Day 10 relative to mice receiving the PBS control.

TABLE 30
Relative Human ANGPTL4 mRNA Levels in
Livers of AAV8-TBG-h-ANGPTL4 Mice

| | | | Dose | Mean human ANGPTL4 mRNA |
|---|---|---|---|---|
| Group | n | Treatment | (μg) | (Relative to Group 1, Day 10) |
| 1 | 4 | PBS | 0 | 1.00 |
| 2 | 4 | ETD01179 | 40 | 0.47 |
| 3 | 4 | ETD01776 | 40 | 0.17 |
| 4 | 4 | ETD01768 | 40 | 0.15 |
| 5 | 4 | ETD01769 | 40 | 0.28 |
| 6 | 4 | ETD01770 | 40 | 0.46 |
| 7 | 4 | ETD01771 | 40 | 0.30 |
| 8 | 4 | ETD01772 | 40 | 1.00 |
| 9 | 4 | ETD01782 | 40 | 0.88 |

[0476] While preferred embodiments of the present invention have been shown and described herein, it will be obvious to those skilled in the art that such embodiments are provided by way of example only. Numerous variations, changes, and substitutions will now occur to those skilled in the art without departing from the invention. It should be understood that various alternatives to the embodiments of the invention described herein may be employed in practicing the invention. It is intended that the following claims define the scope of the invention and that methods and structures within the scope of these claims and their equivalents be covered thereby.

We claim:

1. A composition comprising an oligonucleotide that targets ANGPTL4 and when administered to a subject in an effective amount decreases circulating triglycerides, decreases circulating glucose, decreases a liver steatosis measurement, increases circulating high-density lipoproteins (HDL), or increases insulin sensitivity; wherein the oligonucleotide comprises a small interfering RNA (siRNA) comprising a sense strand and an antisense strand; and
wherein the sense strand comprises modification pattern 8S, 7S, 9S, 10S, 11S, 12S, 13S, 14S, 15S, or 16S; or wherein or the antisense strand comprises modification pattern 10AS, 11AS, 12AS, 13AS, 14AS, or 15AS.

2. A composition comprising an oligonucleotide that targets ANGPTL4 and when administered to a subject in an effective amount decreases circulating triglycerides, decreases circulating glucose, decreases a liver steatosis measurement, increases circulating high-density lipoproteins (HDL), or increases insulin sensitivity; wherein any one of the following is true with regard to a strand of the oligonucleotide:
all purines comprise 2′ fluoro modified purines, and all pyrimidines comprise a mixture of 2′ fluoro and 2′ methyl modified pyrimidines,
all purines comprise 2′ methyl modified purines, and all pyrimidines comprise a mixture of 2′ fluoro and 2′ methyl modified pyrimidines,
all purines comprise 2′ fluoro modified purines, and all pyrimidines comprise 2′ methyl modified pyrimidines,
all pyrimidines comprise 2′ fluoro modified pyrimidines, and all purines comprise a mixture of 2′ fluoro and 2′ methyl modified purines,
all pyrimidines comprise 2′ methyl modified pyrimidines, and all purines comprise a mixture of 2′ fluoro and 2′ methyl modified purines, or
all pyrimidines comprise 2′ fluoro modified pyrimidines, and all purines comprise 2′ methyl modified purines.

3. The composition of claim 2, wherein the increase or decrease is by about 10% or more, as compared to prior to administration.

4. A composition comprising an oligonucleotide that targets ANGPTL4 and when administered to a subject in an effective amount decreases a liver steatosis measurement in the subject.

5. The composition of claim 4, wherein the decrease is by about 10% or more, as compared to prior to administration.

6. The composition of claim 4, wherein the oligonucleotide comprises modification pattern 1S, 2S, 3S, 4S, 5S, 6S, 7S, 8S, 9S, 10S, 11S, 12S, 13S, 14S, 15S, 16S, 1AS, 2AS, 3AS, 4AS, 5AS, 6AS, 7AS, 8AS, 9AS, 10AS, 11AS, 12AS, 13AS, 14AS, or 15AS.

7. The composition of claim 4 or 5, wherein any one of the following is true with regard to a strand of the oligonucleotide:
all purines comprise 2′ fluoro modified purines, and all pyrimidines comprise a mixture of 2′ fluoro and 2′ methyl modified pyrimidines,
all purines comprise 2′ methyl modified purines, and all pyrimidines comprise a mixture of 2′ fluoro and 2′ methyl modified pyrimidines,
all purines comprise 2′ fluoro modified purines, and all pyrimidines comprise 2′ methyl modified pyrimidines,
all pyrimidines comprise 2′ fluoro modified pyrimidines, and all purines comprise a mixture of 2′ fluoro and 2′ methyl modified purines,
all pyrimidines comprise 2′ methyl modified pyrimidines, and all purines comprise a mixture of 2′ fluoro and 2′ methyl modified purines, or
all pyrimidines comprise 2′ fluoro modified pyrimidines, and all purines comprise 2′ methyl modified purines.

8. The composition of any one of claims 1, 2 or 4, wherein the composition comprises an siRNA.

9. The composition of any one of claims 1, 2 or 4, wherein the composition comprises an antisense oligonucleotide (ASO).

10. The composition of any one of claims 1, 2 or 4, wherein the oligonucleotide comprises a N-acetylgalactosamine (GalNAc) moiety attached to a 5′ or 3′ end of the oligonucleotide.

11. The composition of claim 10, comprising: [chemical structure]
wherein J comprises the oligonucleotide, and wherein J comprises an optional phosphate or phosphorothioate linking to the oligonucleotide.

12. A composition comprising an siRNA comprising a sense strand comprising a GalNAc moiety attached at a 5′ or 3′ end and the nucleotide sequence of SEQ ID NO: 14005 or 14299, and an antisense strand having the nucleotide sequence of SEQ ID NO: 14298 or 14153.

13. A method of reducing an ANGPTL4 protein or mRNA measurement in the liver of a subject, comprising administering an effective amount of the composition of any one of claims 1, 2, 4 or 12 to the subject.

14. The method of claim 13, wherein the subject is a primate.

15. A method of treating a subject having a liver disease, comprising administering an effective amount of the composition of any one of claims 1, 2, 4 or 12 to the subject.

16. The method of claim 15, wherein the liver disease comprises nonalcoholic fatty liver disease (NAFLD) or non-alcoholic steatohepatitis (NASH).

The application's sequence listing, which the Patent Office published only in electronic form, follows.

SEQUENCE LISTING (14332 sequences)

SEQ ID NO: 1 - RNA, 19 nt, Artificial Sequence
  Description of Artificial Sequence: Synthetic oligonucleotide
agaagccgagcugagcgga

SEQ ID NO: 2 - RNA, 19 nt, Artificial Sequence
  Description of Artificial Sequence: Synthetic oligonucleotide
gaagccgagcugagcggau

SEQ ID NO: 3 - RNA, 19 nt, Artificial Sequence
  Description of Artificial Sequence: Synthetic oligonucleotide
aagccgagcugagcggauc

SEQ ID NO: 4 - RNA, 19 nt, Artificial Sequence
  Description of Artificial Sequence: Synthetic oligonucleotide
agccgagcugagcggaucc

SEQ ID NO: 5 - RNA, 19 nt, Artificial Sequence
  Description of Artificial Sequence: Synthetic oligonucleotide
gccgagcugagcggauccu

SEQ ID NO: 6 - RNA, 19 nt, Artificial Sequence
  Description of Artificial Sequence: Synthetic oligonucleotide
ccgagcugagcggauccuc

SEQ ID NO: 7 - RNA, 19 nt, Artificial Sequence
  Description of Artificial Sequence: Synthetic oligonucleotide
cgagcugagcggauccuca

SEQ ID NO: 8 - RNA, 19 nt, Artificial Sequence
  Description of Artificial Sequence: Synthetic oligonucleotide
gagcugagcggauccucac

SEQ ID NO: 9 - RNA, 19 nt, Artificial Sequence
  Description of Artificial Sequence: Synthetic oligonucleotide
agcugagcggauccucaca

SEQ ID NO: 10 - RNA, 19 nt, Artificial Sequence
  Description of Artificial Sequence: Synthetic oligonucleotide
gcugagcggauccucacac

SEQ ID NO: 11 - RNA, 19 nt, Artificial Sequence
  Description of Artificial Sequence: Synthetic oligonucleotide
cugagcggauccucacacg

SEQ ID NO: 12 - RNA, 19 nt, Artificial Sequence
  Description of Artificial Sequence: Synthetic oligonucleotide
ugagcggauccucacacga

SEQ ID NO: 13 - RNA, 19 nt, Artificial Sequence
  Description of Artificial Sequence: Synthetic oligonucleotide
gagcggauccucacacgac

SEQ ID NO: 14 - RNA, 19 nt, Artificial Sequence
  Description of Artificial Sequence: Synthetic oligonucleotide
agcggauccucacacgacu

SEQ ID NO: 15 - RNA, 19 nt, Artificial Sequence
  Description of Artificial Sequence: Synthetic oligonucleotide
gcggauccucacacgacug

SEQ ID NO: 16 - RNA, 19 nt, Artificial Sequence
  Description of Artificial Sequence: Synthetic oligonucleotide
cggauccucacacgacugu

SEQ ID NO: 17 - RNA, 19 nt, Artificial Sequence
  Description of Artificial Sequence: Synthetic oligonucleotide
ggauccucacacgacugug

SEQ ID NO: 18 - RNA, 19 nt, Artificial Sequence
  Description of Artificial Sequence: Synthetic oligonucleotide
gauccucacacgacuguga

SEQ ID NO: 19 - RNA, 19 nt, Artificial Sequence
  Description of Artificial Sequence: Synthetic oligonucleotide
auccucacacgacugugau

SEQ ID NO: 20 - RNA, 19 nt, Artificial Sequence
  Description of Artificial Sequence: Synthetic oligonucleotide
uccucacacgacugugauc

SEQ ID NO: 21 - RNA, 19 nt, Artificial Sequence
  Description of Artificial Sequence: Synthetic oligonucleotide
ccucacacgacugugaucc

SEQ ID NO: 22 - RNA, 19 nt, Artificial Sequence
  Description of Artificial Sequence: Synthetic oligonucleotide
cucacacgacugugauccg

SEQ ID NO: 23 - RNA, 19 nt, Artificial Sequence
  Description of Artificial Sequence: Synthetic oligonucleotide
ucacacgacugugauccga

SEQ ID NO: 24 - RNA, 19 nt, Artificial Sequence
  Description of Artificial Sequence: Synthetic oligonucleotide
cacacgacugugauccgau

SEQ ID NO: 25 - RNA, 19 nt, Artificial Sequence
  Description of Artificial Sequence: Synthetic oligonucleotide
acacgacugugauccgauu

SEQ ID NO: 26 - RNA, 19 nt, Artificial Sequence
  Description of Artificial Sequence: Synthetic oligonucleotide
cacgacugugauccgauuc

SEQ ID NO: 27 - RNA, 19 nt, Artificial Sequence
  Description of Artificial Sequence: Synthetic oligonucleotide
acgacugugauccgauucu

SEQ ID NO: 28 - RNA, 19 nt, Artificial Sequence
  Description of Artificial Sequence: Synthetic oligonucleotide
cgacugugauccgauucuu

SEQ ID NO: 29 - RNA, 19 nt, Artificial Sequence
  Description of Artificial Sequence: Synthetic oligonucleotide
gacugugauccgauucuuu

SEQ ID NO: 30 - RNA, 19 nt, Artificial Sequence
  Description of Artificial Sequence: Synthetic oligonucleotide
acugugauccgauucuuuc

SEQ ID NO: 31 - RNA, 19 nt, Artificial Sequence
  Description of Artificial Sequence: Synthetic oligonucleotide
cugugauccgauucuuucc

SEQ ID NO: 32 - RNA, 19 nt, Artificial Sequence
  Description of Artificial Sequence: Synthetic oligonucleotide
ugugauccgauucuuucca

SEQ ID NO: 33 - RNA, 19 nt, Artificial Sequence
  Description of Artificial Sequence: Synthetic oligonucleotide
gugauccgauucuuuccag

SEQ ID NO: 34 - RNA, 19 nt, Artificial Sequence
  Description of Artificial Sequence: Synthetic oligonucleotide
ugauccgauucuuuccagc

SEQ ID NO: 35 - RNA, 19 nt, Artificial Sequence
  Description of Artificial Sequence: Synthetic oligonucleotide
gauccgauucuuuccagcg

SEQ ID NO: 36 - RNA, 19 nt, Artificial Sequence
  Description of Artificial Sequence: Synthetic oligonucleotide
auccgauucuuuccagcgg

SEQ ID NO: 37 - RNA, 19 nt, Artificial Sequence
  Description of Artificial Sequence: Synthetic oligonucleotide
uccgauucuuuccagcggc

SEQ ID NO: 38 - RNA, 19 nt, Artificial Sequence
  Description of Artificial Sequence: Synthetic oligonucleotide
ccgauucuuuccagcggcu

SEQ ID NO: 39 - RNA, 19 nt, Artificial Sequence
  Description of Artificial Sequence: Synthetic oligonucleotide
cgauucuuuccagcggcuu

SEQ ID NO: 40 - RNA, 19 nt, Artificial Sequence
  Description of Artificial Sequence: Synthetic oligonucleotide
gauucuuuccagcggcuuc

SEQ ID NO: 41 - RNA, 19 nt, Artificial Sequence
  Description of Artificial Sequence: Synthetic oligonucleotide
auucuuuccagcggcuucu

SEQ ID NO: 42 - RNA, 19 nt, Artificial Sequence
  Description of Artificial Sequence: Synthetic oligonucleotide
uucuuuccagcggcuucug

SEQ ID NO: 43 - RNA, 19 nt, Artificial Sequence
  Description of Artificial Sequence: Synthetic oligonucleotide
ucuuuccagcggcuucugc

SEQ ID NO: 44 - RNA, 19 nt, Artificial Sequence
  Description of Artificial Sequence: Synthetic oligonucleotide
cuuuccagcggcuucugca

SEQ ID NO: 45 - RNA, 19 nt, Artificial Sequence
  Description of Artificial Sequence: Synthetic oligonucleotide
uuuccagcggcuucugcaa

SEQ ID NO: 46 - RNA, 19 nt, Artificial Sequence
  Description of Artificial Sequence: Synthetic oligonucleotide
uuccagcggcuucugcaac

SEQ ID NO: 47 - RNA, 19 nt, Artificial Sequence
  Description of Artificial Sequence: Synthetic oligonucleotide
uccagcggcuucugcaacc

SEQ ID NO: 48 - RNA, 19 nt, Artificial Sequence
  Description of Artificial Sequence: Synthetic oligonucleotide
ccagcggcuucugcaacca

SEQ ID NO: 49 - RNA, 19 nt, Artificial Sequence
  Description of Artificial Sequence: Synthetic oligonucleotide
cagcggcuucugcaaccaa

SEQ ID NO: 50 - RNA, 19 nt, Artificial Sequence
  Description of Artificial Sequence: Synthetic oligonucleotide
agcggcuucugcaaccaag

SEQ ID NO: 51 - RNA, 19 nt, Artificial Sequence
  Description of Artificial Sequence: Synthetic oligonucleotide
gcggcuucugcaaccaagc

SEQ ID NO: 52 - RNA, 19 nt, Artificial Sequence
  Description of Artificial Sequence: Synthetic oligonucleotide
cggcuucugcaaccaagcg

SEQ ID NO: 53 - RNA, 19 nt, Artificial Sequence
  Description of Artificial Sequence: Synthetic oligonucleotide
ggcuucugcaaccaagcgg

SEQ ID NO: 54 - RNA, 19 nt, Artificial Sequence
  Description of Artificial Sequence: Synthetic oligonucleotide
gcuucugcaaccaagcggg

SEQ ID NO: 55 - RNA, 19 nt, Artificial Sequence
  Description of Artificial Sequence: Synthetic oligonucleotide
cuucugcaaccaagcgggu

SEQ ID NO: 56 - RNA, 19 nt, Artificial Sequence
  Description of Artificial Sequence: Synthetic oligonucleotide
uucugcaaccaagcggguc

SEQ ID NO: 57 - RNA, 19 nt, Artificial Sequence
  Description of Artificial Sequence: Synthetic oligonucleotide
ucugcaaccaagcgggucu

SEQ ID NO: 58 - RNA, 19 nt, Artificial Sequence
  Description of Artificial Sequence: Synthetic oligonucleotide
cugcaaccaagcgggucuu

SEQ ID NO: 59 - RNA, 19 nt, Artificial Sequence
  Description of Artificial Sequence: Synthetic oligonucleotide
ugcaaccaagcgggucuua

SEQ ID NO: 60 - RNA, 19 nt, Artificial Sequence
  Description of Artificial Sequence: Synthetic oligonucleotide
gcaaccaagcgggucuuac

SEQ ID NO: 61 - RNA, 19 nt, Artificial Sequence
  Description of Artificial Sequence: Synthetic oligonucleotide
caaccaagcgggucuuacc

SEQ ID NO: 62 - RNA, 19 nt, Artificial Sequence
  Description of Artificial Sequence: Synthetic oligonucleotide
aaccaagcgggucuuaccc

SEQ ID NO: 63 - RNA, 19 nt, Artificial Sequence
  Description of Artificial Sequence: Synthetic oligonucleotide
accaagcgggucuuacccc

SEQ ID NO: 64 - RNA, 19 nt, Artificial Sequence
  Description of Artificial Sequence: Synthetic oligonucleotide
ccaagcgggucuuaccccc

SEQ ID NO: 65 - RNA, 19 nt, Artificial Sequence
  Description of Artificial Sequence: Synthetic oligonucleotide
caagcgggucuuacccccg

SEQ ID NO: 66 - RNA, 19 nt, Artificial Sequence
  Description of Artificial Sequence: Synthetic oligonucleotide
aagcgggucuuacccccgg

SEQ ID NO: 67 - RNA, 19 nt, Artificial Sequence
  Description of Artificial Sequence: Synthetic oligonucleotide
agcgggucuuacccccggu

SEQ ID NO: 68 - RNA, 19 nt, Artificial Sequence
  Description of Artificial Sequence: Synthetic oligonucleotide
gcgggucuuacccccgguc

SEQ ID NO: 69 - RNA, 19 nt, Artificial Sequence
  Description of Artificial Sequence: Synthetic oligonucleotide
cgggucuuacccccggucc

SEQ ID NO: 70 - RNA, 19 nt, Artificial Sequence
  Description of Artificial Sequence: Synthetic oligonucleotide
gggucuuacccccgguccu

SEQ ID NO: 71 - RNA, 19 nt, Artificial Sequence
  Description of Artificial Sequence: Synthetic oligonucleotide
ggucuuacccccgguccuc

SEQ ID NO: 72 - RNA, 19 nt, Artificial Sequence
  Description of Artificial Sequence: Synthetic oligonucleotide
gucuuacccccgguccucc

SEQ ID NO: 73 - RNA, 19 nt, Artificial Sequence
  Description of Artificial Sequence: Synthetic oligonucleotide
ucuuacccccgguccuccg

SEQ ID NO: 74 - RNA, 19 nt, Artificial Sequence
  Description of Artificial Sequence: Synthetic oligonucleotide
cuuacccccgguccuccgc

SEQ ID NO: 75 - RNA, 19 nt, Artificial Sequence
  Description of Artificial Sequence: Synthetic oligonucleotide
uuacccccgguccuccgcg

SEQ ID NO: 76 - RNA, 19 nt, Artificial Sequence
  Description of Artificial Sequence: Synthetic oligonucleotide
uacccccgguccuccgcgu

SEQ ID NO: 77 - RNA, 19 nt, Artificial Sequence
  Description of Artificial Sequence: Synthetic oligonucleotide
acccccgguccuccgcguc

SEQ ID NO: 78 - RNA, 19 nt, Artificial Sequence
  Description of Artificial Sequence: Synthetic oligonucleotide
cccccgguccuccgcgucu

SEQ ID NO: 79 - RNA, 19 nt, Artificial Sequence
  Description of Artificial Sequence: Synthetic oligonucleotide
ccccgguccuccgcgucuc

SEQ ID NO: 80 - RNA, 19 nt, Artificial Sequence
  Description of Artificial Sequence: Synthetic oligonucleotide
cccgguccuccgcgucucc

SEQ ID NO: 81 - RNA, 19 nt, Artificial Sequence
  Description of Artificial Sequence: Synthetic oligonucleotide
ccgguccuccgcgucucca

SEQ ID NO: 82 - RNA, 19 nt, Artificial Sequence
  Description of Artificial Sequence: Synthetic oligonucleotide
cgguccuccgcgucuccag

SEQ ID NO: 83 - RNA, 19 nt, Artificial Sequence
  Description of Artificial Sequence: Synthetic oligonucleotide
gguccuccgcgucuccagu

SEQ ID NO: 84 - RNA, 19 nt, Artificial Sequence
  Description of Artificial Sequence: Synthetic oligonucleotide
guccuccgcgucuccaguc

SEQ ID NO: 85 - RNA, 19 nt, Artificial Sequence
  Description of Artificial Sequence: Synthetic oligonucleotide
uccuccgcgucuccagucc

SEQ ID NO: 86 - RNA, 19 nt, Artificial Sequence
  Description of Artificial Sequence: Synthetic oligonucleotide
ccuccgcgucuccaguccu

SEQ ID NO: 87 - RNA, 19 nt, Artificial Sequence
  Description of Artificial Sequence: Synthetic oligonucleotide
cuccgcgucuccaguccuc

SEQ ID NO: 88 - RNA, 19 nt, Artificial Sequence
  Description of Artificial Sequence: Synthetic oligonucleotide
uccgcgucuccaguccucg

SEQ ID NO: 89 - RNA, 19 nt, Artificial Sequence
  Description of Artificial Sequence: Synthetic oligonucleotide
ccgcgucuccaguccucgc

SEQ ID NO: 90 - RNA, 19 nt, Artificial Sequence
  Description of Artificial Sequence: Synthetic oligonucleotide
cgcgucuccaguccucgca

SEQ ID NO: 91 - RNA, 19 nt, Artificial Sequence
  Description of Artificial Sequence: Synthetic oligonucleotide
gcgucuccaguccucgcac

SEQ ID NO: 92 - RNA, 19 nt, Artificial Sequence
  Description of Artificial Sequence: Synthetic oligonucleotide
cgucuccaguccucgcacc

SEQ ID NO: 93 - RNA, 19 nt, Artificial Sequence
  Description of Artificial Sequence: Synthetic oligonucleotide
gucuccaguccucgcaccu

SEQ ID NO: 94 - RNA, 19 nt, Artificial Sequence
  Description of Artificial Sequence: Synthetic oligonucleotide
ucuccaguccucgcaccug

SEQ ID NO: 95 - RNA, 19 nt, Artificial Sequence
  Description of Artificial Sequence: Synthetic oligonucleotide
cuccaguccucgcaccugg

SEQ ID NO: 96 - RNA, 19 nt, Artificial Sequence
  Description of Artificial Sequence: Synthetic oligonucleotide
uccaguccucgcaccugga

SEQ ID NO: 97 - RNA, 19 nt, Artificial Sequence
  Description of Artificial Sequence: Synthetic oligonucleotide
ccaguccucgcaccuggaa

SEQ ID NO: 98 - RNA, 19 nt, Artificial Sequence
  Description of Artificial Sequence: Synthetic oligonucleotide
caguccucgcaccuggaac

SEQ ID NO: 99 - RNA, 19 nt, Artificial Sequence
  Description of Artificial Sequence: Synthetic oligonucleotide
aguccucgcaccuggaacc

SEQ ID NO: 100 - RNA, 19 nt, Artificial Sequence
  Description of Artificial Sequence: Synthetic oligonucleotide
guccucgcaccuggaaccc

SEQ ID NO: 101 - RNA, 19 nt, Artificial Sequence
  Description of Artificial Sequence: Synthetic oligonucleotide
uccucgcaccuggaacccc

SEQ ID NO: 102 - RNA, 19 nt, Artificial Sequence
  Description of Artificial Sequence: Synthetic oligonucleotide
ccucgcaccuggaacccca

SEQ ID NO: 103 - RNA, 19 nt, Artificial Sequence
  Description of Artificial Sequence: Synthetic oligonucleotide
cucgcaccuggaaccccaa

SEQ ID NO: 104 - RNA, 19 nt, Artificial Sequence
  Description of Artificial Sequence: Synthetic oligonucleotide
ucgcaccuggaaccccaac

SEQ ID NO: 105 - RNA, 19 nt, Artificial Sequence
  Description of Artificial Sequence: Synthetic oligonucleotide
cgcaccuggaaccccaacg

SEQ ID NO: 106 - RNA, 19 nt, Artificial Sequence
  Description of Artificial Sequence: Synthetic oligonucleotide
gcaccuggaaccccaacgu

SEQ ID NO: 107 - RNA, 19 nt, Artificial Sequence
  Description of Artificial Sequence: Synthetic oligonucleotide
caccuggaaccccaacguc

SEQ ID NO: 108 - RNA, 19 nt, Artificial Sequence
  Description of Artificial Sequence: Synthetic oligonucleotide
accuggaaccccaacgucc

SEQ ID NO: 109 - RNA, 19 nt, Artificial Sequence
  Description of Artificial Sequence: Synthetic oligonucleotide
ccuggaaccccaacguccc

SEQ ID NO: 110 - RNA, 19 nt, Artificial Sequence
  Description of Artificial Sequence: Synthetic oligonucleotide
cuggaaccccaacgucccc

SEQ ID NO: 111 - RNA, 19 nt, Artificial Sequence
  Description of Artificial Sequence: Synthetic oligonucleotide
uggaaccccaacguccccg

SEQ ID NO: 112 - RNA, 19 nt, Artificial Sequence
  Description of Artificial Sequence: Synthetic oligonucleotide
ggaaccccaacguccccga

SEQ ID NO: 113 - RNA, 19 nt, Artificial Sequence
  Description of Artificial Sequence: Synthetic oligonucleotide
gaaccccaacguccccgag

SEQ ID NO: 114 - RNA, 19 nt, Artificial Sequence
  Description of Artificial Sequence: Synthetic oligonucleotide
aaccccaacguccccgaga

SEQ ID NO: 115 - RNA, 19 nt, Artificial Sequence
  Description of Artificial Sequence: Synthetic oligonucleotide
accccaacguccccgagag

SEQ ID NO: 116 - RNA, 19 nt, Artificial Sequence
  Description of Artificial Sequence: Synthetic oligonucleotide
ccccaacguccccgagagu

SEQ ID NO: 117 - RNA, 19 nt, Artificial Sequence
  Description of Artificial Sequence: Synthetic oligonucleotide
cccaacguccccgagaguc

SEQ ID NO: 118 - RNA, 19 nt, Artificial Sequence
  Description of Artificial Sequence: Synthetic oligonucleotide
ccaacguccccgagagucc

SEQ ID NO: 119 - RNA, 19 nt, Artificial Sequence
  Description of Artificial Sequence: Synthetic oligonucleotide
caacguccccgagaguccc

SEQ ID NO: 120 - RNA, 19 nt, Artificial Sequence
  Description of Artificial Sequence: Synthetic oligonucleotide
aacguccccgagagucccc

SEQ ID NO: 121 - RNA, 19 nt, Artificial Sequence
  Description of Artificial Sequence: Synthetic oligonucleotide
acguccccgagaguccccg

SEQ ID NO: 122 - RNA, 19 nt, Artificial Sequence
  Description of Artificial Sequence: Synthetic oligonucleotide
cguccccgagaguccccga

SEQ ID NO: 123 - RNA, 19 nt, Artificial Sequence
  Description of Artificial Sequence: Synthetic oligonucleotide
guccccgagaguccccgaa

SEQ ID NO: 124 - RNA, 19 nt, Artificial Sequence
  Description of Artificial Sequence: Synthetic oligonucleotide
uccccgagaguccccgaau

SEQ ID NO: 125 - RNA, 19 nt, Artificial Sequence
  Description of Artificial Sequence: Synthetic oligonucleotide
ccccgagaguccccgaauc

SEQ ID NO: 126 - RNA, 19 nt, Artificial Sequence
  Description of Artificial Sequence: Synthetic oligonucleotide
cccgagaguccccgaaucc

SEQ ID NO: 127 - RNA, 19 nt, Artificial Sequence
  Description of Artificial Sequence: Synthetic oligonucleotide
ccgagaguccccgaauccc

SEQ ID NO: 128 - RNA, 19 nt, Artificial Sequence
  Description of Artificial Sequence: Synthetic oligonucleotide
cgagaguccccgaaucccc

SEQ ID NO: 129 - RNA, 19 nt, Artificial Sequence
  Description of Artificial Sequence: Synthetic oligonucleotide
gagaguccccgaauccccg

SEQ ID NO: 130 - RNA, 19 nt, Artificial Sequence
  Description of Artificial Sequence: Synthetic oligonucleotide
agaguccccgaauccccgc

SEQ ID NO: 131 - RNA, 19 nt, Artificial Sequence
  Description of Artificial Sequence: Synthetic oligonucleotide
gaguccccgaauccccgcu

SEQ ID NO: 132 - RNA, 19 nt, Artificial Sequence
  Description of Artificial Sequence: Synthetic oligonucleotide
aguccccgaauccccgcuc

SEQ ID NO: 133 - RNA, 19 nt, Artificial Sequence
  Description of Artificial Sequence: Synthetic oligonucleotide
guccccgaauccccgcucc

SEQ ID NO: 134 - RNA, 19 nt, Artificial Sequence
  Description of Artificial Sequence: Synthetic oligonucleotide
uccccgaauccccgcuccc

SEQ ID NO: 135 - RNA, 19 nt, Artificial Sequence
  Description of Artificial Sequence: Synthetic oligonucleotide
ccccgaauccccgcuccca

SEQ ID NO: 136 - RNA, 19 nt, Artificial Sequence
  Description of Artificial Sequence: Synthetic oligonucleotide
cccgaauccccgcucccag

SEQ ID NO: 137 - RNA, 19 nt, Artificial Sequence
  Description of Artificial Sequence: Synthetic oligonucleotide
ccgaauccccgcucccagg

SEQ ID NO: 138 - RNA, 19 nt, Artificial Sequence
  Description of Artificial Sequence: Synthetic oligonucleotide
cgaauccccgcucccaggc

SEQ ID NO: 139 - RNA, 19 nt, Artificial Sequence
  Description of Artificial Sequence: Synthetic oligonucleotide
gaauccccgcucccaggcu

SEQ ID NO: 140 - RNA, 19 nt, Artificial Sequence
  Description of Artificial Sequence: Synthetic oligonucleotide
aauccccgcucccaggcua

SEQ ID NO: 141 - RNA, 19 nt, Artificial Sequence
  Description of Artificial Sequence: Synthetic oligonucleotide
auccccgcucccaggcuac

SEQ ID NO: 142 - RNA, 19 nt, Artificial Sequence
  Description of Artificial Sequence: Synthetic oligonucleotide
uccccgcucccaggcuacc

SEQ ID NO: 143 - RNA, 19 nt, Artificial Sequence
  Description of Artificial Sequence: Synthetic oligonucleotide
ccccgcucccaggcuaccu

SEQ ID NO: 144 - RNA, 19 nt, Artificial Sequence
  Description of Artificial Sequence: Synthetic oligonucleotide
cccgcucccaggcuaccua

SEQ ID NO: 145 - RNA, 19 nt, Artificial Sequence
  Description of Artificial Sequence: Synthetic oligonucleotide
ccgcucccaggcuaccuaa

SEQ ID NO: 146 - RNA, 19 nt, Artificial Sequence
  Description of Artificial Sequence: Synthetic oligonucleotide
cgcucccaggcuaccuaag

SEQ ID NO: 147 - RNA, 19 nt, Artificial Sequence
  Description of Artificial Sequence: Synthetic oligonucleotide
gcucccaggcuaccuaaga

SEQ ID NO: 148 - RNA, 19 nt, Artificial Sequence
  Description of Artificial Sequence: Synthetic oligonucleotide
cucccaggcuaccuaagag

SEQ ID NO: 149 - RNA, 19 nt, Artificial Sequence
  Description of Artificial Sequence: Synthetic oligonucleotide
ucccaggcuaccuaagagg

SEQ ID NO: 150 - RNA, 19 nt, Artificial Sequence
  Description of Artificial Sequence: Synthetic oligonucleotide
cccaggcuaccuaagagga

SEQ ID NO: 151 - RNA, 19 nt, Artificial Sequence
  Description of Artificial Sequence: Synthetic oligonucleotide
ccaggcuaccuaagaggau

SEQ ID NO: 152 - RNA, 19 nt, Artificial Sequence
  Description of Artificial Sequence: Synthetic oligonucleotide
caggcuaccuaagaggaug

SEQ ID NO: 153 - RNA, 19 nt, Artificial Sequence
  Description of Artificial Sequence: Synthetic oligonucleotide
aggcuaccuaagaggauga

SEQ ID NO: 154 - RNA, 19 nt, Artificial Sequence
  Description of Artificial Sequence: Synthetic oligonucleotide
ggcuaccuaagaggaugag

SEQ ID NO: 155 - RNA, 19 nt, Artificial Sequence
  Description of Artificial Sequence: Synthetic oligonucleotide
gcuaccuaagaggaugagc

SEQ ID NO: 156 - RNA, 19 nt, Artificial Sequence
  Description of Artificial Sequence: Synthetic oligonucleotide
cuaccuaagaggaugagcg

SEQ ID NO: 157 - RNA, 19 nt, Artificial Sequence
  Description of Artificial Sequence: Synthetic oligonucleotide
uaccuaagaggaugagcgg

SEQ ID NO: 158 - RNA, 19 nt, Artificial Sequence
  Description of Artificial Sequence: Synthetic oligonucleotide
accuaagaggaugagcggu

SEQ ID NO: 159 - RNA, 19 nt, Artificial Sequence
  Description of Artificial Sequence: Synthetic oligonucleotide
ccuaagaggaugagcggug

SEQ ID NO: 160 - RNA, 19 nt, Artificial Sequence
  Description of Artificial Sequence: Synthetic oligonucleotide
cuaagaggaugagcggugc

SEQ ID NO: 161 - RNA, 19 nt, Artificial Sequence
  Description of Artificial Sequence: Synthetic oligonucleotide
uaagaggaugagcggugcu

SEQ ID NO: 162 - RNA, 19 nt, Artificial Sequence
  Description of Artificial Sequence: Synthetic oligonucleotide
aagaggaugagcggugcuc

SEQ ID NO: 163 - RNA, 19 nt, Artificial Sequence
  Description of Artificial Sequence: Synthetic oligonucleotide
agaggaugagcggugcucc

SEQ ID NO: 164 - RNA, 19 nt, Artificial Sequence
  Description of Artificial Sequence: Synthetic oligonucleotide
gaggaugagcggugcuccg

SEQ ID NO: 165 - RNA, 19 nt, Artificial Sequence
  Description of Artificial Sequence: Synthetic oligonucleotide
aggaugagcggugcuccga

SEQ ID NO: 166 - RNA, 19 nt, Artificial Sequence
  Description of Artificial Sequence: Synthetic oligonucleotide
ggaugagcggugcuccgac

SEQ ID NO: 167 - RNA, 19 nt, Artificial Sequence
  Description of Artificial Sequence: Synthetic oligonucleotide
gaugagcggugcuccgacg

SEQ ID NO: 168 - RNA, 19 nt, Artificial Sequence
  Description of Artificial Sequence: Synthetic oligonucleotide
augagcggugcuccgacgg

SEQ ID NO: 169 - RNA, 19 nt, Artificial Sequence
  Description of Artificial Sequence: Synthetic oligonucleotide
ugagcggugcuccgacggc

SEQ ID NO: 170 - RNA, 19 nt, Artificial Sequence
  Description of Artificial Sequence: Synthetic oligonucleotide
gagcggugcuccgacggcc

SEQ ID NO: 171 - RNA, 19 nt, Artificial Sequence
  Description of Artificial Sequence: Synthetic oligonucleotide
agcggugcuccgacggccg

SEQ ID NO: 172 - RNA, 19 nt, Artificial Sequence
  Description of Artificial Sequence: Synthetic oligonucleotide
gcggugcuccgacggccgg

SEQ ID NO: 173 - RNA, 19 nt, Artificial Sequence
  Description of Artificial Sequence: Synthetic oligonucleotide
cggugcuccgacggccggg

SEQ ID NO: 174 - RNA, 19 nt, Artificial Sequence
  Description of Artificial Sequence: Synthetic oligonucleotide
ggugcuccgacggccgggg

SEQ ID NO: 175 - RNA, 19 nt, Artificial Sequence
  Description of Artificial Sequence: Synthetic oligonucleotide
gugcuccgacggccggggc

SEQ ID NO: 176 - RNA, 19 nt, Artificial Sequence
  Description of Artificial Sequence: Synthetic oligonucleotide
ugcuccgacggccggggca

SEQ ID NO: 177 - RNA, 19 nt, Artificial Sequence
  Description of Artificial Sequence: Synthetic oligonucleotide
gcuccgacggccggggcag

SEQ ID NO: 178 - RNA, 19 nt, Artificial Sequence
  Description of Artificial Sequence: Synthetic oligonucleotide
cuccgacggccggggcagc

SEQ ID NO: 179 - RNA, 19 nt, Artificial Sequence
  Description of Artificial Sequence: Synthetic oligonucleotide
uccgacggccggggcagcc

SEQ ID NO: 180 - RNA, 19 nt, Artificial Sequence
  Description of Artificial Sequence: Synthetic oligonucleotide
ccgacggccggggcagccc

SEQ ID NO: 181 - RNA, 19 nt, Artificial Sequence
  Description of Artificial Sequence: Synthetic oligonucleotide
cgacggccggggcagcccu

SEQ ID NO: 182 - RNA, 19 nt, Artificial Sequence
  Description of Artificial Sequence: Synthetic oligonucleotide
gacggccggggcagcccug

SEQ ID NO: 183 - RNA, 19 nt, Artificial Sequence
  Description of Artificial Sequence: Synthetic oligonucleotide
acggccggggcagcccuga

SEQ ID NO: 184 - RNA, 19 nt, Artificial Sequence
  Description of Artificial Sequence: Synthetic oligonucleotide
cggccggggcagcccugau

SEQ ID NO: 185 - RNA, 19 nt, Artificial Sequence
  Description of Artificial Sequence: Synthetic oligonucleotide
ggccggggcagcccugaug

SEQ ID NO: 186 - RNA, 19 nt, Artificial Sequence
  Description of Artificial Sequence: Synthetic oligonucleotide
gccggggcagcccugaugc

SEQ ID NO: 187 - RNA, 19 nt, Artificial Sequence
  Description of Artificial Sequence: Synthetic oligonucleotide
ccggggcagcccugaugcu

SEQ ID NO: 188 - RNA, 19 nt, Artificial Sequence
  Description of Artificial Sequence: Synthetic oligonucleotide
cggggcagcccugaugcuc

SEQ ID NO: 189 - RNA, 19 nt, Artificial Sequence
  Description of Artificial Sequence: Synthetic oligonucleotide
ggggcagcccugaugcucu

SEQ ID NO: 190 - RNA, 19 nt, Artificial Sequence
  Description of Artificial Sequence: Synthetic oligonucleotide
gggcagcccugaugcucug

SEQ ID NO: 191 - RNA, 19 nt, Artificial Sequence
  Description of Artificial Sequence: Synthetic oligonucleotide
ggcagcccugaugcucugc

SEQ ID NO: 192 - RNA, 19 nt, Artificial Sequence
  Description of Artificial Sequence: Synthetic oligonucleotide
gcagcccugaugcucugcg

SEQ ID NO: 193 - RNA, 19 nt, Artificial Sequence
  Description of Artificial Sequence: Synthetic oligonucleotide
cagcccugaugcucugcgc

SEQ ID NO: 194 - RNA, 19 nt, Artificial Sequence
  Description of Artificial Sequence: Synthetic oligonucleotide
agcccugaugcucugcgcc

SEQ ID NO: 195 - RNA, 19 nt, Artificial Sequence
  Description of Artificial Sequence: Synthetic oligonucleotide
gcccugaugcucugcgccg

SEQ ID NO: 196 - RNA, 19 nt, Artificial Sequence
  Description of Artificial Sequence: Synthetic oligonucleotide
cccugaugcucugcgccgc

SEQ ID NO: 197 - RNA, 19 nt, Artificial Sequence
  Description of Artificial Sequence: Synthetic oligonucleotide
ccugaugcucugcgccgcc

SEQ ID NO: 198 - RNA, 19 nt, Artificial Sequence
  Description of Artificial Sequence: Synthetic oligonucleotide
cugaugcucugcgccgcca

SEQ ID NO: 199 - RNA, 19 nt, Artificial Sequence
  Description of Artificial Sequence: Synthetic oligonucleotide
ugaugcucugcgccgccac

SEQ ID NO: 200 - RNA, 19 nt, Artificial Sequence
  Description of Artificial Sequence: Synthetic oligonucleotide
gaugcucugcgccgccacc

SEQ ID NO: 201 - RNA, 19 nt, Artificial Sequence
  Description of Artificial Sequence: Synthetic oligonucleotide
augcucugcgccgccaccg

SEQ ID NO: 202 - RNA, 19 nt, Artificial Sequence
  Description of Artificial Sequence: Synthetic oligonucleotide
ugcucugcgccgccaccgc

SEQ ID NO: 203 - RNA, 19 nt, Artificial Sequence
  Description of Artificial Sequence: Synthetic oligonucleotide
gcucugcgccgccaccgcc

SEQ ID NO: 204 - RNA, 19 nt, Artificial Sequence
  Description of Artificial Sequence: Synthetic oligonucleotide
cucugcgccgccaccgccg

SEQ ID NO: 205 - RNA, 19 nt, Artificial Sequence
  Description of Artificial Sequence: Synthetic oligonucleotide
ucugcgccgccaccgccgu

SEQ ID NO: 206 - RNA, 19 nt, Artificial Sequence
  Description of Artificial Sequence: Synthetic oligonucleotide
cugcgccgccaccgccgug

SEQ ID NO: 207 - RNA, 19 nt, Artificial Sequence
  Description of Artificial Sequence: Synthetic oligonucleotide
ugcgccgccaccgccgugc

SEQ ID NO: 208 - RNA, 19 nt, Artificial Sequence
  Description of Artificial Sequence: Synthetic oligonucleotide
gcgccgccaccgccgugcu

SEQ ID NO: 209 - RNA, 19 nt, Artificial Sequence
  Description of Artificial Sequence: Synthetic oligonucleotide
cgccgccaccgccgugcua

SEQ ID NO: 210 - RNA, 19 nt, Artificial Sequence
  Description of Artificial Sequence: Synthetic oligonucleotide
gccgccaccgccgugcuac

SEQ ID NO: 211 - RNA, 19 nt, Artificial Sequence
  Description of Artificial Sequence: Synthetic oligonucleotide
ccgccaccgccgugcuacu

SEQ ID NO: 212 - RNA, 19 nt, Artificial Sequence
  Description of Artificial Sequence: Synthetic oligonucleotide
cgccaccgccgugcuacug

SEQ ID NO: 213 - RNA, 19 nt, Artificial Sequence
  Description of Artificial Sequence: Synthetic oligonucleotide
gccaccgccgugcuacuga

SEQ ID NO: 214 - RNA, 19 nt, Artificial Sequence
  Description of Artificial Sequence: Synthetic oligonucleotide
ccaccgccgugcuacugag

SEQ ID NO: 215 - RNA, 19 nt, Artificial Sequence
  Description of Artificial Sequence: Synthetic oligonucleotide
caccgccgugcuacugagc

SEQ ID NO: 216 - RNA, 19 nt, Artificial Sequence
  Description of Artificial Sequence: Synthetic oligonucleotide
accgccgugcuacugagcg

SEQ ID NO: 217 - RNA, 19 nt, Artificial Sequence
  Description of Artificial Sequence: Synthetic oligonucleotide
ccgccgugcuacugagcgc

SEQ ID NO: 218 - RNA, 19 nt, Artificial Sequence
  Description of Artificial Sequence: Synthetic oligonucleotide
cgccgugcuacugagcgcu

SEQ ID NO: 219 - RNA, 19 nt, Artificial Sequence
  Description of Artificial Sequence: Synthetic oligonucleotide
gccgugcuacugagcgcuc

SEQ ID NO: 220 - RNA, 19 nt, Artificial Sequence
  Description of Artificial Sequence: Synthetic oligonucleotide
ccgugcuacugagcgcuca

SEQ ID NO: 221 - RNA, 19 nt, Artificial Sequence
  Description of Artificial Sequence: Synthetic oligonucleotide
cgugcuacugagcgcucag

SEQ ID NO: 222 - RNA, 19 nt, Artificial Sequence
  Description of Artificial Sequence: Synthetic oligonucleotide
gugcuacugagcgcucagg

SEQ ID NO: 223 - RNA, 19 nt, Artificial Sequence
  Description of Artificial Sequence: Synthetic oligonucleotide
ugcuacugagcgcucaggg

SEQ ID NO: 224 - RNA, 19 nt, Artificial Sequence
  Description of Artificial Sequence: Synthetic oligonucleotide
gcuacugagcgcucagggc

SEQ ID NO: 225 - RNA, 19 nt, Artificial Sequence
  Description of Artificial Sequence: Synthetic oligonucleotide
cuacugagcgcucagggcg

SEQ ID NO: 226 - RNA, 19 nt, Artificial Sequence
  Description of Artificial Sequence: Synthetic oligonucleotide
uacugagcgcucagggcgg

SEQ ID NO: 227 - RNA, 19 nt, Artificial Sequence
  Description of Artificial Sequence: Synthetic oligonucleotide
acugagcgcucagggcgga

SEQ ID NO: 228 - RNA, 19 nt, Artificial Sequence
  Description of Artificial Sequence: Synthetic oligonucleotide
cugagcgcucagggcggac

SEQ ID NO: 229 - RNA, 19 nt, Artificial Sequence
  Description of Artificial Sequence: Synthetic oligonucleotide
ugagcgcucagggcggacc

SEQ ID NO: 230 - RNA, 19 nt, Artificial Sequence
  Description of Artificial Sequence: Synthetic oligonucleotide
gagcgcucagggcggaccc

SEQ ID NO: 231 - RNA, 19 nt, Artificial Sequence
  Description of Artificial Sequence: Synthetic oligonucleotide
agcgcucagggcggacccg

SEQ ID NO: 232 - RNA, 19 nt, Artificial Sequence
  Description of Artificial Sequence: Synthetic oligonucleotide
gcgcucagggcggacccgu

SEQ ID NO: 233 - RNA, 19 nt, Artificial Sequence
  Description of Artificial Sequence: Synthetic oligonucleotide
cgcucagggcggacccgug

SEQ ID NO: 234 - RNA, 19 nt, Artificial Sequence
  Description of Artificial Sequence: Synthetic oligonucleotide
gcucagggcggacccgugc

SEQ ID NO: 235 - RNA, 19 nt, Artificial Sequence
  Description of Artificial Sequence: Synthetic oligonucleotide
cucagggcggacccgugca

SEQ ID NO: 236 - RNA, 19 nt, Artificial Sequence
  Description of Artificial Sequence: Synthetic oligonucleotide
ucagggcggacccgugcag

SEQ ID NO: 237 - RNA, 19 nt, Artificial Sequence
  Description of Artificial Sequence: Synthetic oligonucleotide
cagggcggacccgugcagu

SEQ ID NO: 238 - RNA, 19 nt, Artificial Sequence
  Description of Artificial Sequence: Synthetic oligonucleotide
agggcggacccgugcaguc

SEQ ID NO: 239 - RNA, 19 nt, Artificial Sequence
  Description of Artificial Sequence: Synthetic oligonucleotide
gggcggacccgugcagucc

SEQ ID NO: 240 - RNA, 19 nt, Artificial Sequence
  Description of Artificial Sequence: Synthetic oligonucleotide
ggcggacccgugcagucca

SEQ ID NO: 241 - RNA, 19 nt, Artificial Sequence
  Description of Artificial Sequence: Synthetic oligonucleotide
gcggacccgugcaguccaa

SEQ ID NO: 242 - RNA, 19 nt, Artificial Sequence
  Description of Artificial Sequence: Synthetic oligonucleotide
cggacccgugcaguccaag

SEQ ID NO: 243 - RNA, 19 nt, Artificial Sequence
  Description of Artificial Sequence: Synthetic oligonucleotide
ggacccgugcaguccaagu

SEQ ID NO: 244 - RNA, 19 nt, Artificial Sequence
  Description of Artificial Sequence: Synthetic oligonucleotide
gacccgugcaguccaaguc

SEQ ID NO: 245 - RNA, 19 nt, Artificial Sequence
  Description of Artificial Sequence: Synthetic oligonucleotide
acccgugcaguccaagucg

SEQ ID NO: 246 - RNA, 19 nt, Artificial Sequence
  Description of Artificial Sequence: Synthetic oligonucleotide
cccgugcaguccaagucgc

SEQ ID NO: 247 - RNA, 19 nt, Artificial Sequence
  Description of Artificial Sequence: Synthetic oligonucleotide
ccgugcaguccaagucgcc

SEQ ID NO: 248 - RNA, 19 nt, Artificial Sequence
  Description of Artificial Sequence: Synthetic oligonucleotide
cgugcaguccaagucgccg

SEQ ID NO: 249 - RNA, 19 nt, Artificial Sequence
  Description of Artificial Sequence: Synthetic oligonucleotide
gugcaguccaagucgccgc

SEQ ID NO: 250 - RNA, 19 nt, Artificial Sequence
  Description of Artificial Sequence: Synthetic oligonucleotide
ugcaguccaagucgccgcg

SEQ ID NO: 251 - RNA, 19 nt, Artificial Sequence
  Description of Artificial Sequence: Synthetic oligonucleotide
gcaguccaagucgccgcgc

SEQ ID NO: 252 - RNA, 19 nt, Artificial Sequence
  Description of Artificial Sequence: Synthetic oligonucleotide
caguccaagucgccgcgcu

SEQ ID NO: 253 - RNA, 19 nt, Artificial Sequence
  Description of Artificial Sequence: Synthetic oligonucleotide
aguccaagucgccgcgcuu

SEQ ID NO: 254 - RNA, 19 nt, Artificial Sequence
  Description of Artificial Sequence: Synthetic oligonucleotide
guccaagucgccgcgcuuu

SEQ ID NO: 255 - RNA, 19 nt, Artificial Sequence
  Description of Artificial Sequence: Synthetic oligonucleotide
uccaagucgccgcgcuuug

SEQ ID NO: 256 - RNA, 19 nt, Artificial Sequence
  Description of Artificial Sequence: Synthetic oligonucleotide
ccaagucgccgcgcuuugc

SEQ ID NO: 257 - RNA, 19 nt, Artificial Sequence
  Description of Artificial Sequence: Synthetic oligonucleotide
caagucgccgcgcuuugcg

SEQ ID NO: 258 - RNA, 19 nt, Artificial Sequence
  Description of Artificial Sequence: Synthetic oligonucleotide
aagucgccgcgcuuugcgu

SEQ ID NO: 259 - RNA, 19 nt, Artificial Sequence
  Description of Artificial Sequence: Synthetic oligonucleotide
agucgccgcgcuuugcguc

SEQ ID NO: 260 - RNA, 19 nt, Artificial Sequence
  Description of Artificial Sequence: Synthetic oligonucleotide
gucgccgcgcuuugcgucc

SEQ ID NO: 261 - RNA, 19 nt, Artificial Sequence
  Description of Artificial Sequence: Synthetic oligonucleotide
ucgccgcgcuuugcguccu

SEQ ID NO: 262 - RNA, 19 nt, Artificial Sequence
  Description of Artificial Sequence: Synthetic oligonucleotide
cgccgcgcuuugcguccug

SEQ ID NO: 263 - RNA, 19 nt, Artificial Sequence
  Description of Artificial Sequence: Synthetic oligonucleotide
gccgcgcuuugcguccugg

SEQ ID NO: 264 - RNA, 19 nt, Artificial Sequence
  Description of Artificial Sequence: Synthetic oligonucleotide
ccgcgcuuugcguccuggg

SEQ ID NO: 265 - RNA, 19 nt, Artificial Sequence
  Description of Artificial Sequence: Synthetic oligonucleotide
cgcgcuuugcguccuggga

SEQ ID NO: 266 - RNA, 19 nt, Artificial Sequence
  Description of Artificial Sequence: Synthetic oligonucleotide
gcgcuuugcguccugggac

SEQ ID NO: 267 - RNA, 19 nt, Artificial Sequence
  Description of Artificial Sequence: Synthetic oligonucleotide
cgcuuugcguccugggacg

SEQ ID NO: 268 - RNA, 19 nt, Artificial Sequence
  Description of Artificial Sequence: Synthetic oligonucleotide
gcuuugcguccugggacga

SEQ ID NO: 269 - RNA, 19 nt, Artificial Sequence
  Description of Artificial Sequence: Synthetic oligonucleotide
cuuugcguccugggacgag

SEQ ID NO: 270 - RNA, 19 nt, Artificial Sequence
  Description of Artificial Sequence: Synthetic oligonucleotide
uuugcguccugggacgaga

SEQ ID NO: 271 - RNA, 19 nt, Artificial Sequence
  Description of Artificial Sequence: Synthetic oligonucleotide
uugcguccugggacgagau

SEQ ID NO: 272 - RNA, 19 nt, Artificial Sequence
  Description of Artificial Sequence: Synthetic oligonucleotide
ugcguccugggacgagaug

SEQ ID NO: 273 - RNA, 19 nt, Artificial Sequence
  Description of Artificial Sequence: Synthetic oligonucleotide
gcguccugggacgagauga

SEQ ID NO: 274 - RNA, 19 nt, Artificial Sequence
  Description of Artificial Sequence: Synthetic oligonucleotide
cguccugggacgagaugaa

SEQ ID NO: 275 - RNA, 19 nt, Artificial Sequence
  Description of Artificial Sequence: Synthetic oligonucleotide
guccugggacgagaugaau

SEQ ID NO: 276 - RNA, 19 nt, Artificial Sequence
  Description of Artificial Sequence: Synthetic oligonucleotide
uccugggacgagaugaaug

SEQ ID NO: 277 - RNA, 19 nt, Artificial Sequence
  Description of Artificial Sequence: Synthetic oligonucleotide
ccugggacgagaugaaugu

SEQ ID NO: 278 - RNA, 19 nt, Artificial Sequence
  Description of Artificial Sequence: Synthetic oligonucleotide
cugggacgagaugaauguc

SEQ ID NO: 279 - RNA, 19 nt, Artificial Sequence
  Description of Artificial Sequence: Synthetic oligonucleotide
ugggacgagaugaaugucc

SEQ ID NO: 280 - RNA, 19 nt, Artificial Sequence
  Description of Artificial Sequence: Synthetic oligonucleotide
gggacgagaugaauguccu

SEQ ID NO: 281 - RNA, 19 nt, Artificial Sequence
  Description of Artificial Sequence: Synthetic oligonucleotide
ggacgagaugaauguccug

SEQ ID NO: 282 - RNA, 19 nt, Artificial Sequence
  Description of Artificial Sequence: Synthetic oligonucleotide
gacgagaugaauguccugg

SEQ ID NO: 283 - RNA, 19 nt, Artificial Sequence
  Description of Artificial Sequence: Synthetic oligonucleotide
acgagaugaauguccuggc

SEQ ID NO: 284 - RNA, 19 nt, Artificial Sequence
  Description of Artificial Sequence: Synthetic oligonucleotide
cgagaugaauguccuggcg

SEQ ID NO: 285 - RNA, 19 nt, Artificial Sequence
  Description of Artificial Sequence: Synthetic oligonucleotide
gagaugaauguccuggcgc

SEQ ID NO: 286 - RNA, 19 nt, Artificial Sequence
  Description of Artificial Sequence: Synthetic oligonucleotide
agaugaauguccuggcgca

SEQ ID NO: 287 - RNA, 19 nt, Artificial Sequence
  Description of Artificial Sequence: Synthetic oligonucleotide
gaugaauguccuggcgcac

SEQ ID NO: 288 - RNA, 19 nt, Artificial Sequence
  Description of Artificial Sequence: Synthetic oligonucleotide
augaauguccuggcgcacg

SEQ ID NO: 289 - RNA, 19 nt, Artificial Sequence
  Description of Artificial Sequence: Synthetic oligonucleotide
ugaauguccuggcgcacgg

SEQ ID NO: 290 - RNA, 19 nt, Artificial Sequence
  Description of Artificial Sequence: Synthetic oligonucleotide
gaauguccuggcgcacgga

SEQ ID NO: 291 - RNA, 19 nt, Artificial Sequence
  Description of Artificial Sequence: Synthetic oligonucleotide
aauguccuggcgcacggac

SEQ ID NO: 292 - RNA, 19 nt, Artificial Sequence
  Description of Artificial Sequence: Synthetic oligonucleotide
auguccuggcgcacggacu

SEQ ID NO: 293 - RNA, 19 nt, Artificial Sequence
  Description of Artificial Sequence: Synthetic oligonucleotide
uguccuggcgcacggacuc

SEQ ID NO: 294 - RNA, 19 nt, Artificial Sequence
  Description of Artificial Sequence: Synthetic oligonucleotide
guccuggcgcacggacucc

SEQ ID NO: 295 - RNA, 19 nt, Artificial Sequence
  Description of Artificial Sequence: Synthetic oligonucleotide
uccuggcgcacggacuccu

SEQ ID NO: 296 - RNA, 19 nt, Artificial Sequence
  Description of Artificial Sequence: Synthetic oligonucleotide
ccuggcgcacggacuccug

SEQ ID NO: 297 - RNA, 19 nt, Artificial Sequence
  Description of Artificial Sequence: Synthetic oligonucleotide
cuggcgcacggacuccugc

SEQ ID NO: 298 - RNA, 19 nt, Artificial Sequence
  Description of Artificial Sequence: Synthetic oligonucleotide
uggcgcacggacuccugca

SEQ ID NO: 299 - RNA, 19 nt, Artificial Sequence
  Description of Artificial Sequence: Synthetic oligonucleotide
ggcgcacggacuccugcag

SEQ ID NO: 300 - RNA, 19 nt, Artificial Sequence
  Description of Artificial Sequence: Synthetic oligonucleotide
gcgcacggacuccugcagc

SEQ ID NO: 301 - RNA, 19 nt, Artificial Sequence
  Description of Artificial Sequence: Synthetic oligonucleotide
cgcacggacuccugcagcu

SEQ ID NO: 302 - RNA, 19 nt, Artificial Sequence
  Description of Artificial Sequence: Synthetic oligonucleotide
gcacggacuccugcagcuc

SEQ ID NO: 303 - RNA, 19 nt, Artificial Sequence
  Description of Artificial Sequence: Synthetic oligonucleotide
cacggacuccugcagcucg

SEQ ID NO: 304 - RNA, 19 nt, Artificial Sequence
  Description of Artificial Sequence: Synthetic oligonucleotide
acggacuccugcagcucgg

SEQ ID NO: 305 - RNA, 19 nt, Artificial Sequence
  Description of Artificial Sequence: Synthetic oligonucleotide
cggacuccugcagcucggc

SEQ ID NO: 306 - RNA, 19 nt, Artificial Sequence
  Description of Artificial Sequence: Synthetic oligonucleotide
ggacuccugcagcucggcc

SEQ ID NO: 307 - RNA, 19 nt, Artificial Sequence
  Description of Artificial Sequence: Synthetic oligonucleotide
gacuccugcagcucggcca

SEQ ID NO: 308 - RNA, 19 nt, Artificial Sequence
  Description of Artificial Sequence: Synthetic oligonucleotide
acuccugcagcucggccag

SEQ ID NO: 309 - RNA, 19 nt, Artificial Sequence
  Description of Artificial Sequence: Synthetic oligonucleotide
cuccugcagcucggccagg

SEQ ID NO: 310 - RNA, 19 nt, Artificial Sequence
  Description of Artificial Sequence: Synthetic oligonucleotide
uccugcagcucggccaggg

SEQ ID NO: 311 - RNA, 19 nt, Artificial Sequence
  Description of Artificial Sequence: Synthetic oligonucleotide
ccugcagcucggccagggg

SEQ ID NO: 312 - RNA, 19 nt, Artificial Sequence
  Description of Artificial Sequence: Synthetic oligonucleotide
cugcagcucggccaggggc

SEQ ID NO: 313 - RNA, 19 nt, Artificial Sequence
  Description of Artificial Sequence: Synthetic oligonucleotide
ugcagcucggccaggggcu

SEQ ID NO: 314 - RNA, 19 nt, Artificial Sequence
  Description of Artificial Sequence: Synthetic oligonucleotide
gcagcucggccaggggcug

SEQ ID NO: 315 - RNA, 19 nt, Artificial Sequence
  Description of Artificial Sequence: Synthetic oligonucleotide
cagcucggccaggggcugc

SEQ ID NO: 316 - RNA, 19 nt, Artificial Sequence
  Description of Artificial Sequence: Synthetic oligonucleotide
agcucggccaggggcugcg

SEQ ID NO: 317 - RNA, 19 nt, Artificial Sequence
  Description of Artificial Sequence: Synthetic oligonucleotide
gcucggccaggggcugcgc

SEQ ID NO: 318 - RNA, 19 nt, Artificial Sequence
  Description of Artificial Sequence: Synthetic oligonucleotide
cucggccaggggcugcgcg

SEQ ID NO: 319 - RNA, 19 nt, Artificial Sequence
  Description of Artificial Sequence: Synthetic oligonucleotide
ucggccaggggcugcgcga

SEQ ID NO: 320 - RNA, 19 nt, Artificial Sequence
  Description of Artificial Sequence: Synthetic oligonucleotide
cggccaggggcugcgcgaa

SEQ ID NO: 321 - RNA, 19 nt, Artificial Sequence
  Description of Artificial Sequence: Synthetic oligonucleotide
ggccaggggcugcgcgaac

SEQ ID NO: 322 - RNA, 19 nt, Artificial Sequence
  Description of Artificial Sequence: Synthetic oligonucleotide
gccaggggcugcgcgaaca

SEQ ID NO: 323 - RNA, 19 nt, Artificial Sequence
  Description of Artificial Sequence: Synthetic oligonucleotide
ccaggggcugcgcgaacac

SEQ ID NO: 324 - RNA, 19 nt, Artificial Sequence
  Description of Artificial Sequence: Synthetic oligonucleotide
caggggcugcgcgaacacg

SEQ ID NO: 325 - RNA, 19 nt, Artificial Sequence
  Description of Artificial Sequence: Synthetic oligonucleotide
aggggcugcgcgaacacgc

SEQ ID NO: 326 - RNA, 19 nt, Artificial Sequence
  Description of Artificial Sequence: Synthetic oligonucleotide
ggggcugcgcgaacacgcg

SEQ ID NO: 327 - RNA, 19 nt, Artificial Sequence
  Description of Artificial Sequence: Synthetic oligonucleotide
gggcugcgcgaacacgcgg

SEQ ID NO: 328 - RNA, 19 nt, Artificial Sequence
  Description of Artificial Sequence: Synthetic oligonucleotide
ggcugcgcgaacacgcgga

SEQ ID NO: 329 - RNA, 19 nt, Artificial Sequence
  Description of Artificial Sequence: Synthetic oligonucleotide
gcugcgcgaacacgcggag

SEQ ID NO: 330 - RNA, 19 nt, Artificial Sequence
  Description of Artificial Sequence: Synthetic oligonucleotide
cugcgcgaacacgcggagc

SEQ ID NO: 331 - RNA, 19 nt, Artificial Sequence
  Description of Artificial Sequence: Synthetic oligonucleotide
ugcgcgaacacgcggagcg

SEQ ID NO: 332 - RNA, 19 nt, Artificial Sequence
  Description of Artificial Sequence: Synthetic oligonucleotide
gcgcgaacacgcggagcgc

SEQ ID NO: 333 - RNA, 19 nt, Artificial Sequence
  Description of Artificial Sequence: Synthetic oligonucleotide
cgcgaacacgcggagcgca

SEQ ID NO: 334 - RNA, 19 nt, Artificial Sequence
  Description of Artificial Sequence: Synthetic oligonucleotide
gcgaacacgcggagcgcac

SEQ ID NO: 335 - RNA, 19 nt, Artificial Sequence
  Description of Artificial Sequence: Synthetic oligonucleotide
cgaacacgcggagcgcacc

SEQ ID NO: 336 - RNA, 19 nt, Artificial Sequence
  Description of Artificial Sequence: Synthetic oligonucleotide
gaacacgcggagcgcaccc

SEQ ID NO: 337 - RNA, 19 nt, Artificial Sequence
  Description of Artificial Sequence: Synthetic oligonucleotide
aacacgcggagcgcacccg

SEQ ID NO: 338 - RNA, 19 nt, Artificial Sequence
  Description of Artificial Sequence: Synthetic oligonucleotide
acacgcggagcgcacccgc

SEQ ID NO: 339 - RNA, 19 nt, Artificial Sequence
  Description of Artificial Sequence: Synthetic oligonucleotide
cacgcggagcgcacccgca

SEQ ID NO: 340 - RNA, 19 nt, Artificial Sequence
  Description of Artificial Sequence: Synthetic oligonucleotide
acgcggagcgcacccgcag

SEQ ID NO: 341 - RNA, 19 nt, Artificial Sequence
  Description of Artificial Sequence: Synthetic oligonucleotide
cgcggagcgcacccgcagu

SEQ ID NO: 342 - RNA, 19 nt, Artificial Sequence
  Description of Artificial Sequence: Synthetic oligonucleotide
gcggagcgcacccgcaguc

SEQ ID NO: 343 - RNA, 19 nt, Artificial Sequence
  Description of Artificial Sequence: Synthetic oligonucleotide
cggagcgcacccgcaguca

SEQ ID NO: 344 - RNA, 19 nt, Artificial Sequence
  Description of Artificial Sequence: Synthetic oligonucleotide
ggagcgcacccgcagucag

SEQ ID NO: 345 - RNA, 19 nt, Artificial Sequence
  Description of Artificial Sequence: Synthetic oligonucleotide
gagcgcacccgcagucagc

SEQ ID NO: 346 - RNA, 19 nt, Artificial Sequence
  Description of Artificial Sequence: Synthetic oligonucleotide
agcgcacccgcagucagcu

SEQ ID NO: 347 - RNA, 19 nt, Artificial Sequence
  Description of Artificial Sequence: Synthetic oligonucleotide
gcgcacccgcagucagcug

SEQ ID NO: 348 - RNA, 19 nt, Artificial Sequence
  Description of Artificial Sequence: Synthetic oligonucleotide
cgcacccgcagucagcuga

SEQ ID NO: 349 - RNA, 19 nt, Artificial Sequence
  Description of Artificial Sequence: Synthetic oligonucleotide
gcacccgcagucagcugag

SEQ ID NO: 350 - RNA, 19 nt, Artificial Sequence
  Description of Artificial Sequence: Synthetic oligonucleotide
cacccgcagucagcugagc

SEQ ID NO: 351 - RNA, 19 nt, Artificial Sequence
  Description of Artificial Sequence: Synthetic oligonucleotide
acccgcagucagcugagcg

SEQ ID NO: 352 - RNA, 19 nt, Artificial Sequence
  Description of Artificial Sequence: Synthetic oligonucleotide
cccgcagucagcugagcgc

SEQ ID NO: 353 - RNA, 19 nt, Artificial Sequence
  Description of Artificial Sequence: Synthetic oligonucleotide
ccgcagucagcugagcgcg

SEQ ID NO: 354 - RNA, 19 nt, Artificial Sequence
  Description of Artificial Sequence: Synthetic oligonucleotide
cgcagucagcugagcgcgc

SEQ ID NO: 355 - RNA, 19 nt, Artificial Sequence
  Description of Artificial Sequence: Synthetic oligonucleotide
gcagucagcugagcgcgcu

SEQ ID NO: 356 - RNA, 19 nt, Artificial Sequence
  Description of Artificial Sequence: Synthetic oligonucleotide
cagucagcugagcgcgcug

SEQ ID NO: 357 - RNA, 19 nt, Artificial Sequence
  Description of Artificial Sequence: Synthetic oligonucleotide
agucagcugagcgcgcugg

SEQ ID NO: 358 - RNA, 19 nt, Artificial Sequence
  Description of Artificial Sequence: Synthetic oligonucleotide
gucagcugagcgcgcugga

SEQ ID NO: 359 - RNA, 19 nt, Artificial Sequence
  Description of Artificial Sequence: Synthetic oligonucleotide
ucagcugagcgcgcuggag

SEQ ID NO: 360 - RNA, 19 nt, Artificial Sequence
  Description of Artificial Sequence: Synthetic oligonucleotide
cagcugagcgcgcuggagc

SEQ ID NO: 361 - RNA, 19 nt, Artificial Sequence
  Description of Artificial Sequence: Synthetic oligonucleotide
agcugagcgcgcuggagcg

SEQ ID NO: 362 - RNA, 19 nt, Artificial Sequence
  Description of Artificial Sequence: Synthetic oligonucleotide
gcugagcgcgcuggagcgg

SEQ ID NO: 363 - RNA, 19 nt, Artificial Sequence
  Description of Artificial Sequence: Synthetic oligonucleotide
cugagcgcgcuggagcggc

SEQ ID NO: 364 - RNA, 19 nt, Artificial Sequence
  Description of Artificial Sequence: Synthetic oligonucleotide
ugagcgcgcuggagcggcg

SEQ ID NO: 365 - RNA, 19 nt, Artificial Sequence
  Description of Artificial Sequence: Synthetic oligonucleotide
gagcgcgcuggagcggcgc

SEQ ID NO: 366 - RNA, 19 nt, Artificial Sequence
  Description of Artificial Sequence: Synthetic oligonucleotide
agcgcgcuggagcggcgcc

SEQ ID NO: 367 - RNA, 19 nt, Artificial Sequence
  Description of Artificial Sequence: Synthetic oligonucleotide
gcgcgcuggagcggcgccu

SEQ ID NO: 368 - RNA, 19 nt, Artificial Sequence
  Description of Artificial Sequence: Synthetic oligonucleotide
cgcgcuggagcggcgccug

SEQ ID NO: 369 - RNA, 19 nt, Artificial Sequence
  Description of Artificial Sequence: Synthetic oligonucleotide
gcgcuggagcggcgccuga

SEQ ID NO: 370 - RNA, 19 nt, Artificial Sequence
  Description of Artificial Sequence: Synthetic oligonucleotide
cgcuggagcggcgccugag

SEQ ID NO: 371 - RNA, 19 nt, Artificial Sequence
  Description of Artificial Sequence: Synthetic oligonucleotide
gcuggagcggcgccugagc

SEQ ID NO: 372 - RNA, 19 nt, Artificial Sequence
  Description of Artificial Sequence: Synthetic oligonucleotide
cuggagcggcgccugagcg

SEQ ID NO: 373 - RNA, 19 nt, Artificial Sequence
  Description of Artificial Sequence: Synthetic oligonucleotide
uggagcggcgccugagcgc

SEQ ID NO: 374 - RNA, 19 nt, Artificial Sequence
  Description of Artificial Sequence: Synthetic oligonucleotide
ggagcggcgccugagcgcg

SEQ ID NO: 375 - RNA, 19 nt, Artificial Sequence
  Description of Artificial Sequence: Synthetic oligonucleotide
gagcggcgccugagcgcgu

SEQ ID NO: 376 - RNA, 19 nt, Artificial Sequence
  Description of Artificial Sequence: Synthetic oligonucleotide
agcggcgccugagcgcgug

SEQ ID NO: 377 - RNA, 19 nt, Artificial Sequence
  Description of Artificial Sequence: Synthetic oligonucleotide
gcggcgccugagcgcgugc

SEQ ID NO: 378 - RNA, 19 nt, Artificial Sequence
  Description of Artificial Sequence: Synthetic oligonucleotide
cggcgccugagcgcgugcg

SEQ ID NO: 379 - RNA, 19 nt, Artificial Sequence
  Description of Artificial Sequence: Synthetic oligonucleotide
ggcgccugagcgcgugcgg

SEQ ID NO: 380 - RNA, 19 nt, Artificial Sequence
  Description of Artificial Sequence: Synthetic oligonucleotide
gcgccugagcgcgugcggg

SEQ ID NO: 381 - RNA, 19 nt, Artificial Sequence
  Description of Artificial Sequence: Synthetic oligonucleotide
cgccugagcgcgugcgggu

SEQ ID NO: 382 - RNA, 19 nt, Artificial Sequence
  Description of Artificial Sequence: Synthetic oligonucleotide
gccugagcgcgugcggguc

SEQ ID NO: 383 - RNA, 19 nt, Artificial Sequence
  Description of Artificial Sequence: Synthetic oligonucleotide
ccugagcgcgugcgggucc

SEQ ID NO: 384 - RNA, 19 nt, Artificial Sequence
  Description of Artificial Sequence: Synthetic oligonucleotide
cugagcgcgugcggguccg

SEQ ID NO: 385 - RNA, 19 nt, Artificial Sequence
  Description of Artificial Sequence: Synthetic oligonucleotide
ugagcgcgugcggguccgc

SEQ ID NO: 386 - RNA, 19 nt, Artificial Sequence
  Description of Artificial Sequence: Synthetic oligonucleotide
gagcgcgugcggguccgcc

SEQ ID NO: 387 - RNA, 19 nt, Artificial Sequence
  Description of Artificial Sequence: Synthetic oligonucleotide
agcgcgugcggguccgccu

SEQ ID NO: 388 - RNA, 19 nt, Artificial Sequence
  Description of Artificial Sequence: Synthetic oligonucleotide
gcgcgugcggguccgccug

SEQ ID NO: 389 - RNA, 19 nt, Artificial Sequence
  Description of Artificial Sequence: Synthetic oligonucleotide
cgcgugcggguccgccugu

SEQ ID NO: 390 - RNA, 19 nt, Artificial Sequence
  Description of Artificial Sequence: Synthetic oligonucleotide
gcgugcggguccgccuguc

SEQ ID NO: 391 - RNA, 19 nt, Artificial Sequence
  Description of Artificial Sequence: Synthetic oligonucleotide
cgugcggguccgccuguca

SEQ ID NO: 392 - RNA, 19 nt, Artificial Sequence
  Description of Artificial Sequence: Synthetic oligonucleotide
gugcggguccgccugucag

SEQ ID NO: 393 - RNA, 19 nt, Artificial Sequence
  Description of Artificial Sequence: Synthetic oligonucleotide
ugcggguccgccugucagg

SEQ ID NO: 394 - RNA, 19 nt, Artificial Sequence
  Description of Artificial Sequence: Synthetic oligonucleotide
gcggguccgccugucaggg

SEQ ID NO: 395 - RNA, 19 nt, Artificial Sequence
  Description of Artificial Sequence: Synthetic oligonucleotide
cggguccgccugucaggga

SEQ ID NO: 396 - RNA, 19 nt, Artificial Sequence
  Description of Artificial Sequence: Synthetic oligonucleotide
ggguccgccugucagggaa

SEQ ID NO: 397 - RNA, 19 nt, Artificial Sequence
  Description of Artificial Sequence: Synthetic oligonucleotide
gguccgccugucagggaac

SEQ ID NO: 398 - RNA, 19 nt, Artificial Sequence
  Description of Artificial Sequence: Synthetic oligonucleotide
guccgccugucagggaacc

SEQ ID NO: 399 - RNA, 19 nt, Artificial Sequence
  Description of Artificial Sequence: Synthetic oligonucleotide
uccgccugucagggaaccg

SEQ ID NO: 400 - RNA, 19 nt, Artificial Sequence
  Description of Artificial Sequence: Synthetic oligonucleotide
ccgccugucagggaaccga

SEQ ID NO: 401 - RNA, 19 nt, Artificial Sequence
  Description of Artificial Sequence: Synthetic oligonucleotide
cgccugucagggaaccgag

SEQ ID NO: 402 - RNA, 19 nt, Artificial Sequence
  Description of Artificial Sequence: Synthetic oligonucleotide
gccugucagggaaccgagg

SEQ ID NO: 403 - RNA, 19 nt, Artificial Sequence
  Description of Artificial Sequence: Synthetic oligonucleotide
ccugucagggaaccgaggg

SEQ ID NO: 404 - RNA, 19 nt, Artificial Sequence
  Description of Artificial Sequence: Synthetic oligonucleotide
cugucagggaaccgagggg

SEQ ID NO: 405 - RNA, 19 nt, Artificial Sequence
  Description of Artificial Sequence: Synthetic oligonucleotide
ugucagggaaccgaggggu

SEQ ID NO: 406 - RNA, 19 nt, Artificial Sequence
  Description of Artificial Sequence: Synthetic oligonucleotide
gucagggaaccgagggguc

SEQ ID NO: 407 - RNA, 19 nt, Artificial Sequence
  Description of Artificial Sequence: Synthetic oligonucleotide
ucagggaaccgaggggucc

SEQ ID NO: 408 - RNA, 19 nt, Artificial Sequence
  Description of Artificial Sequence: Synthetic oligonucleotide
cagggaaccgaggggucca

SEQ ID NO: 409 - RNA, 19 nt, Artificial Sequence
  Description of Artificial Sequence: Synthetic oligonucleotide
agggaaccgagggguccac

SEQ ID NO: 410 - RNA, 19 nt, Artificial Sequence
  Description of Artificial Sequence: Synthetic oligonucleotide
gggaaccgagggguccacc

SEQ ID NO: 411 - RNA, 19 nt, Artificial Sequence
  Description of Artificial Sequence: Synthetic oligonucleotide
ggaaccgagggguccaccg

SEQ ID NO: 412 - RNA, 19 nt, Artificial Sequence
  Description of Artificial Sequence: Synthetic oligonucleotide
gaaccgagggguccaccga

SEQ ID NO: 413 - RNA, 19 nt, Artificial Sequence
  Description of Artificial Sequence: Synthetic oligonucleotide
aaccgagggguccaccgac

SEQ ID NO: 414 - RNA, 19 nt, Artificial Sequence
  Description of Artificial Sequence: Synthetic oligonucleotide
accgagggguccaccgacc

SEQ ID NO: 415 - RNA, 19 nt, Artificial Sequence
  Description of Artificial Sequence: Synthetic oligonucleotide
ccgagggguccaccgaccu

SEQ ID NO: 416 - RNA, 19 nt, Artificial Sequence
  Description of Artificial Sequence: Synthetic oligonucleotide
cgagggguccaccgaccuc

SEQ ID NO: 417 - RNA, 19 nt, Artificial Sequence
  Description of Artificial Sequence: Synthetic oligonucleotide
gagggguccaccgaccucc

SEQ ID NO: 418 - RNA, 19 nt, Artificial Sequence
  Description of Artificial Sequence: Synthetic oligonucleotide
agggguccaccgaccuccc

SEQ ID NO: 419 - RNA, 19 nt, Artificial Sequence
  Description of Artificial Sequence: Synthetic oligonucleotide
gggguccaccgaccucccg

SEQ ID NO: 420 - RNA, 19 nt, Artificial Sequence
  Description of Artificial Sequence: Synthetic oligonucleotide
ggguccaccgaccucccgu

SEQ ID NO: 421 - RNA, 19 nt, Artificial Sequence
  Description of Artificial Sequence: Synthetic oligonucleotide
gguccaccgaccucccguu

SEQ ID NO: 422 - RNA, 19 nt, Artificial Sequence
  Description of Artificial Sequence: Synthetic oligonucleotide
guccaccgaccucccguua

SEQ ID NO: 423 - RNA, 19 nt, Artificial Sequence
  Description of Artificial Sequence: Synthetic oligonucleotide
uccaccgaccucccguuag

SEQ ID NO: 424 - RNA, 19 nt, Artificial Sequence
  Description of Artificial Sequence: Synthetic oligonucleotide
ccaccgaccucccguuagc

SEQ ID NO: 425 - RNA, 19 nt, Artificial Sequence
  Description of Artificial Sequence: Synthetic oligonucleotide
caccgaccucccguuagcc

SEQ ID NO: 426 - RNA, 19 nt, Artificial Sequence
  Description of Artificial Sequence: Synthetic oligonucleotide
accgaccucccguuagccc

SEQ ID NO: 427 - RNA, 19 nt, Artificial Sequence
  Description of Artificial Sequence: Synthetic oligonucleotide
ccgaccucccguuagcccc

SEQ ID NO: 428 - RNA, 19 nt, Artificial Sequence
  Description of Artificial Sequence: Synthetic oligonucleotide
cgaccucccguuagccccu

SEQ ID NO: 429 - RNA, 19 nt, Artificial Sequence
  Description of Artificial Sequence: Synthetic oligonucleotide
gaccucccguuagccccug

SEQ ID NO: 430 - RNA, 19 nt, Artificial Sequence
  Description of Artificial Sequence: Synthetic oligonucleotide
accucccguuagccccuga

SEQ ID NO: 431 - RNA, 19 nt, Artificial Sequence
  Description of Artificial Sequence: Synthetic oligonucleotide
ccucccguuagccccugag

SEQ ID NO: 432 - RNA, 19 nt, Artificial Sequence
  Description of Artificial Sequence: Synthetic oligonucleotide
cucccguuagccccugaga

SEQ ID NO: 433 - RNA, 19 nt, Artificial Sequence
  Description of Artificial Sequence: Synthetic oligonucleotide
ucccguuagccccugagag

SEQ ID NO: 434 - RNA, 19 nt, Artificial Sequence
  Description of Artificial Sequence: Synthetic oligonucleotide
cccguuagccccugagagc

SEQ ID NO: 435 - RNA, 19 nt, Artificial Sequence
  Description of Artificial Sequence: Synthetic oligonucleotide
ccguuagccccugagagcc

SEQ ID NO: 436 - RNA, 19 nt, Artificial Sequence
  Description of Artificial Sequence: Synthetic oligonucleotide
cguuagccccugagagccg

SEQ ID NO: 437 - RNA, 19 nt, Artificial Sequence
  Description of Artificial Sequence: Synthetic oligonucleotide
guuagccccugagagccgg

SEQ ID NO: 438 - RNA, 19 nt, Artificial Sequence
  Description of Artificial Sequence: Synthetic oligonucleotide
uuagccccugagagccggg

SEQ ID NO: 439 - RNA, 19 nt, Artificial Sequence
  Description of Artificial Sequence: Synthetic oligonucleotide
uagccccugagagccgggu

SEQ ID NO: 440 - RNA, 19 nt, Artificial Sequence
  Description of Artificial Sequence: Synthetic oligonucleotide
agccccugagagccgggug

SEQ ID NO: 441 - RNA, 19 nt, Artificial Sequence
  Description of Artificial Sequence: Synthetic oligonucleotide
gccccugagagccgggugg

SEQ ID NO: 442 - RNA, 19 nt, Artificial Sequence
  Description of Artificial Sequence: Synthetic oligonucleotide
ccccugagagccgggugga

SEQ ID NO: 443 - RNA, 19 nt, Artificial Sequence
  Description of Artificial Sequence: Synthetic oligonucleotide
cccugagagccggguggac

SEQ ID NO: 444 - RNA, 19 nt, Artificial Sequence
  Description of Artificial Sequence: Synthetic oligonucleotide
ccugagagccggguggacc

SEQ ID NO: 445 - RNA, 19 nt, Artificial Sequence
  Description of Artificial Sequence: Synthetic oligonucleotide
cugagagccggguggaccc

SEQ ID NO: 446 - RNA, 19 nt, Artificial Sequence
  Description of Artificial Sequence: Synthetic oligonucleotide
ugagagccggguggacccu

SEQ ID NO: 447 - RNA, 19 nt, Artificial Sequence
  Description of Artificial Sequence: Synthetic oligonucleotide
gagagccggguggacccug

SEQ ID NO: 448 - RNA, 19 nt, Artificial Sequence
  Description of Artificial Sequence: Synthetic oligonucleotide
agagccggguggacccuga

SEQ ID NO: 449 - RNA, 19 nt, Artificial Sequence
  Description of Artificial Sequence: Synthetic oligonucleotide
gagccggguggacccugag

SEQ ID NO: 450 - RNA, 19 nt, Artificial Sequence
  Description of Artificial Sequence: Synthetic oligonucleotide
agccggguggacccugagg

SEQ ID NO: 451 - RNA, 19 nt, Artificial Sequence
  Description of Artificial Sequence: Synthetic oligonucleotide
gccggguggacccugaggu

SEQ ID NO: 452 - RNA, 19 nt, Artificial Sequence
  Description of Artificial Sequence: Synthetic oligonucleotide
ccggguggacccugagguc

SEQ ID NO: 453 - RNA, 19 nt, Artificial Sequence
  Description of Artificial Sequence: Synthetic oligonucleotide
cggguggacccugaggucc

SEQ ID NO: 454 - RNA, 19 nt, Artificial Sequence
  Description of Artificial Sequence: Synthetic oligonucleotide
ggguggacccugagguccu

SEQ ID NO: 455 - RNA, 19 nt, Artificial Sequence
  Description of Artificial Sequence: Synthetic oligonucleotide
gguggacccugagguccuu

SEQ ID NO: 456 - RNA, 19 nt, Artificial Sequence
  Description of Artificial Sequence: Synthetic oligonucleotide
guggacccugagguccuuc

SEQ ID NO: 457 - RNA, 19 nt, Artificial Sequence
  Description of Artificial Sequence: Synthetic oligonucleotide
uggacccugagguccuuca

SEQ ID NO: 458 - RNA, 19 nt, Artificial Sequence
  Description of Artificial Sequence: Synthetic oligonucleotide
ggacccugagguccuucac

SEQ ID NO: 459 - RNA, 19 nt, Artificial Sequence
  Description of Artificial Sequence: Synthetic oligonucleotide
gacccugagguccuucaca

SEQ ID NO: 460 - RNA, 19 nt, Artificial Sequence
  Description of Artificial Sequence: Synthetic oligonucleotide
acccugagguccuucacag

SEQ ID NO: 461 - RNA, 19 nt, Artificial Sequence
  Description of Artificial Sequence: Synthetic oligonucleotide
cccugagguccuucacagc

SEQ ID NO: 462 - RNA, 19 nt, Artificial Sequence
  Description of Artificial Sequence: Synthetic oligonucleotide
ccugagguccuucacagcc

SEQ ID NO: 463 - RNA, 19 nt, Artificial Sequence
  Description of Artificial Sequence: Synthetic oligonucleotide
cugagguccuucacagccu

SEQ ID NO: 464 - RNA, 19 nt, Artificial Sequence
  Description of Artificial Sequence: Synthetic oligonucleotide
ugagguccuucacagccug

SEQ ID NO: 465 - RNA, 19 nt, Artificial Sequence
  Description of Artificial Sequence: Synthetic oligonucleotide
gagguccuucacagccugc

SEQ ID NO: 466 - RNA, 19 nt, Artificial Sequence
  Description of Artificial Sequence: Synthetic oligonucleotide
agguccuucacagccugca

SEQ ID NO: 467 - RNA, 19 nt, Artificial Sequence
  Description of Artificial Sequence: Synthetic oligonucleotide
gguccuucacagccugcag

SEQ ID NO: 468 - RNA, 19 nt, Artificial Sequence
  Description of Artificial Sequence: Synthetic oligonucleotide
guccuucacagccugcaga

SEQ ID NO: 469 - RNA, 19 nt, Artificial Sequence
  Description of Artificial Sequence: Synthetic oligonucleotide
uccuucacagccugcagac

SEQ ID NO: 470 - RNA, 19 nt, Artificial Sequence
  Description of Artificial Sequence: Synthetic oligonucleotide
ccuucacagccugcagaca

SEQ ID NO: 471 - RNA, 19 nt, Artificial Sequence
  Description of Artificial Sequence: Synthetic oligonucleotide
cuucacagccugcagacac

SEQ ID NO: 472 - RNA, 19 nt, Artificial Sequence
  Description of Artificial Sequence: Synthetic oligonucleotide
uucacagccugcagacaca

SEQ ID NO: 473 - RNA, 19 nt, Artificial Sequence
  Description of Artificial Sequence: Synthetic oligonucleotide
ucacagccugcagacacaa

SEQ ID NO: 474 - RNA, 19 nt, Artificial Sequence
  Description of Artificial Sequence: Synthetic oligonucleotide
cacagccugcagacacaac

SEQ ID NO: 475 - RNA, 19 nt, Artificial Sequence
  Description of Artificial Sequence: Synthetic oligonucleotide
acagccugcagacacaacu

SEQ ID NO: 476 - RNA, 19 nt, Artificial Sequence
  Description of Artificial Sequence: Synthetic oligonucleotide
cagccugcagacacaacuc

SEQ ID NO: 477 - RNA, 19 nt, Artificial Sequence
  Description of Artificial Sequence: Synthetic oligonucleotide
agccugcagacacaacuca

SEQ ID NO: 478 - RNA, 19 nt, Artificial Sequence
  Description of Artificial Sequence: Synthetic oligonucleotide
gccugcagacacaacucaa

SEQ ID NO: 479 - RNA, 19 nt, Artificial Sequence
  Description of Artificial Sequence: Synthetic oligonucleotide
ccugcagacacaacucaag

SEQ ID NO: 480 - RNA, 19 nt, Artificial Sequence
  Description of Artificial Sequence: Synthetic oligonucleotide
cugcagacacaacucaagg

SEQ ID NO: 481 - RNA, 19 nt, Artificial Sequence
  Description of Artificial Sequence: Synthetic oligonucleotide
ugcagacacaacucaaggc

SEQ ID NO: 482 - RNA, 19 nt, Artificial Sequence
  Description of Artificial Sequence: Synthetic oligonucleotide
gcagacacaacucaaggcu

SEQ ID NO: 483 - RNA, 19 nt, Artificial Sequence
  Description of Artificial Sequence: Synthetic oligonucleotide
cagacacaacucaaggcuc

SEQ ID NO: 484 - RNA, 19 nt, Artificial Sequence
  Description of Artificial Sequence: Synthetic oligonucleotide
agacacaacucaaggcuca

SEQ ID NO: 485 - RNA, 19 nt, Artificial Sequence
  Description of Artificial Sequence: Synthetic oligonucleotide
gacacaacucaaggcucag

SEQ ID NO: 486 - RNA, 19 nt, Artificial Sequence
  Description of Artificial Sequence: Synthetic oligonucleotide
acacaacucaaggcucaga

SEQ ID NO: 487 - RNA, 19 nt, Artificial Sequence
  Description of Artificial Sequence: Synthetic oligonucleotide
cacaacucaaggcucagaa

SEQ ID NO: 488 - RNA, 19 nt, Artificial Sequence
  Description of Artificial Sequence: Synthetic oligonucleotide
acaacucaaggcucagaac

SEQ ID NO: 489 - RNA, 19 nt, Artificial Sequence
  Description of Artificial Sequence: Synthetic oligonucleotide
caacucaaggcucagaaca

SEQ ID NO: 490 - RNA, 19 nt, Artificial Sequence
  Description of Artificial Sequence: Synthetic oligonucleotide
aacucaaggcucagaacag

SEQ ID NO: 491 - RNA, 19 nt, Artificial Sequence
  Description of Artificial Sequence: Synthetic oligonucleotide
acucaaggcucagaacagc

SEQ ID NO: 492 - RNA, 19 nt, Artificial Sequence
  Description of Artificial Sequence: Synthetic oligonucleotide
cucaaggcucagaacagca

SEQ ID NO: 493 - RNA, 19 nt, Artificial Sequence
  Description of Artificial Sequence: Synthetic oligonucleotide
ucaaggcucagaacagcag

SEQ ID NO: 494 - RNA, 19 nt, Artificial Sequence
  Description of Artificial Sequence: Synthetic oligonucleotide
caaggcucagaacagcagg

SEQ ID NO: 495 - RNA, 19 nt, Artificial Sequence
  Description of Artificial Sequence: Synthetic oligonucleotide
aaggcucagaacagcagga

SEQ ID NO: 496 - RNA, 19 nt, Artificial Sequence
  Description of Artificial Sequence: Synthetic oligonucleotide
aggcucagaacagcaggau

SEQ ID NO: 497 - RNA, 19 nt, Artificial Sequence
  Description of Artificial Sequence: Synthetic oligonucleotide
ggcucagaacagcaggauc

SEQ ID NO: 498 - RNA, 19 nt, Artificial Sequence
  Description of Artificial Sequence: Synthetic oligonucleotide
gcucagaacagcaggaucc

SEQ ID NO: 499 - RNA, 19 nt, Artificial Sequence
  Description of Artificial Sequence: Synthetic oligonucleotide
cucagaacagcaggaucca

SEQ ID NO: 500 - RNA, 19 nt, Artificial Sequence
  Description of Artificial Sequence: Synthetic oligonucleotide
ucagaacagcaggauccag

SEQ ID NO: 501 - RNA, 19 nt, Artificial Sequence
  Description of Artificial Sequence: Synthetic oligonucleotide
cagaacagcaggauccagc

SEQ ID NO: 502 - RNA, 19 nt, Artificial Sequence
  Description of Artificial Sequence: Synthetic oligonucleotide
agaacagcaggauccagca

SEQ ID NO: 503 - RNA, 19 nt, Artificial Sequence
  Description of Artificial Sequence: Synthetic oligonucleotide
gaacagcaggauccagcaa

SEQ ID NO: 504 - RNA, 19 nt, Artificial Sequence
  Description of Artificial Sequence: Synthetic oligonucleotide
aacagcaggauccagcaac

SEQ ID NO: 505 - RNA, 19 nt, Artificial Sequence
  Description of Artificial Sequence: Synthetic oligonucleotide
acagcaggauccagcaacu

SEQ ID NO: 506 - RNA, 19 nt, Artificial Sequence
  Description of Artificial Sequence: Synthetic oligonucleotide
cagcaggauccagcaacuc

SEQ ID NO: 507 - RNA, 19 nt, Artificial Sequence
  Description of Artificial Sequence: Synthetic oligonucleotide
agcaggauccagcaacucu

SEQ ID NO: 508 - RNA, 19 nt, Artificial Sequence
  Description of Artificial Sequence: Synthetic oligonucleotide
gcaggauccagcaacucuu

SEQ ID NO: 509 - RNA, 19 nt, Artificial Sequence
  Description of Artificial Sequence: Synthetic oligonucleotide
caggauccagcaacucuuc

SEQ ID NO: 510 - RNA, 19 nt, Artificial Sequence
  Description of Artificial Sequence: Synthetic oligonucleotide
aggauccagcaacucuucc

SEQ ID NO: 511 - RNA, 19 nt, Artificial Sequence
  Description of Artificial Sequence: Synthetic oligonucleotide
ggauccagcaacucuucca

SEQ ID NO: 512 - RNA, 19 nt, Artificial Sequence
  Description of Artificial Sequence: Synthetic oligonucleotide
gauccagcaacucuuccac

SEQ ID NO: 513 - RNA, 19 nt, Artificial Sequence
  Description of Artificial Sequence: Synthetic oligonucleotide
auccagcaacucuuccaca

SEQ ID NO: 514 - RNA, 19 nt, Artificial Sequence
  Description of Artificial Sequence: Synthetic oligonucleotide
uccagcaacucuuccacaa

SEQ ID NO: 515 - RNA, 19 nt, Artificial Sequence
  Description of Artificial Sequence: Synthetic oligonucleotide
ccagcaacucuuccacaag

SEQ ID NO: 516 - RNA, 19 nt, Artificial Sequence
  Description of Artificial Sequence: Synthetic oligonucleotide
cagcaacucuuccacaagg

SEQ ID NO: 517 - RNA, 19 nt, Artificial Sequence
  Description of Artificial Sequence: Synthetic oligonucleotide
agcaacucuuccacaaggu

SEQ ID NO: 518 - RNA, 19 nt, Artificial Sequence
  Description of Artificial Sequence: Synthetic oligonucleotide
gcaacucuuccacaaggug

SEQ ID NO: 519 - RNA, 19 nt, Artificial Sequence
  Description of Artificial Sequence: Synthetic oligonucleotide
caacucuuccacaaggugg

SEQ ID NO: 520 - RNA, 19 nt, Artificial Sequence
  Description of Artificial Sequence: Synthetic oligonucleotide
aacucuuccacaagguggc

SEQ ID NO: 521 - RNA, 19 nt, Artificial Sequence
  Description of Artificial Sequence: Synthetic oligonucleotide
acucuuccacaagguggcc

SEQ ID NO: 522 - RNA, 19 nt, Artificial Sequence
  Description of Artificial Sequence: Synthetic oligonucleotide
cucuuccacaagguggccc

SEQ ID NO: 523 - RNA, 19 nt, Artificial Sequence
  Description of Artificial Sequence: Synthetic oligonucleotide
ucuuccacaagguggccca

SEQ ID NO: 524 - RNA, 19 nt, Artificial Sequence
  Description of Artificial Sequence: Synthetic oligonucleotide
cuuccacaagguggcccag

SEQ ID NO: 525 - RNA, 19 nt, Artificial Sequence
  Description of Artificial Sequence: Synthetic oligonucleotide
uuccacaagguggcccagc

SEQ ID NO: 526 - RNA, 19 nt, Artificial Sequence
  Description of Artificial Sequence: Synthetic oligonucleotide
uccacaagguggcccagca

SEQ ID NO: 527 - RNA, 19 nt, Artificial Sequence
  Description of Artificial Sequence: Synthetic oligonucleotide
ccacaagguggcccagcag

SEQ ID NO: 528 - RNA, 19 nt, Artificial Sequence
  Description of Artificial Sequence: Synthetic oligonucleotide
cacaagguggcccagcagc

SEQ ID NO: 529 - RNA, 19 nt, Artificial Sequence
  Description of Artificial Sequence: Synthetic oligonucleotide
acaagguggcccagcagca

SEQ ID NO: 530 - RNA, 19 nt, Artificial Sequence
  Description of Artificial Sequence: Synthetic oligonucleotide
caagguggcccagcagcag

SEQ ID NO: 531 - RNA, 19 nt, Artificial Sequence
  Description of Artificial Sequence: Synthetic oligonucleotide
aagguggcccagcagcagc

SEQ ID NO: 532 - RNA, 19 nt, Artificial Sequence
  Description of Artificial Sequence: Synthetic oligonucleotide
agguggcccagcagcagcg

SEQ ID NO: 533 - RNA, 19 nt, Artificial Sequence
  Description of Artificial Sequence: Synthetic oligonucleotide
gguggcccagcagcagcgg

SEQ ID NO: 534 - RNA, 19 nt, Artificial Sequence
  Description of Artificial Sequence: Synthetic oligonucleotide
guggcccagcagcagcggc

SEQ ID NO: 535 - RNA, 19 nt, Artificial Sequence
  Description of Artificial Sequence: Synthetic oligonucleotide
uggcccagcagcagcggca

SEQ ID NO: 536 - RNA, 19 nt, Artificial Sequence
  Description of Artificial Sequence: Synthetic oligonucleotide
ggcccagcagcagcggcac

SEQ ID NO: 537 - RNA, 19 nt, Artificial Sequence
  Description of Artificial Sequence: Synthetic oligonucleotide
gcccagcagcagcggcacc

SEQ ID NO: 538 - RNA, 19 nt, Artificial Sequence
  Description of Artificial Sequence: Synthetic oligonucleotide
cccagcagcagcggcaccu

SEQ ID NO: 539 - RNA, 19 nt, Artificial Sequence
  Description of Artificial Sequence: Synthetic oligonucleotide
ccagcagcagcggcaccug

SEQ ID NO: 540 - RNA, 19 nt, Artificial Sequence
  Description of Artificial Sequence: Synthetic oligonucleotide
cagcagcagcggcaccugg

SEQ ID NO: 541 - RNA, 19 nt, Artificial Sequence
  Description of Artificial Sequence: Synthetic oligonucleotide
agcagcagcggcaccugga

SEQ ID NO: 542 - RNA, 19 nt, Artificial Sequence
  Description of Artificial Sequence: Synthetic oligonucleotide
gcagcagcggcaccuggag

SEQ ID NO: 543 - RNA, 19 nt, Artificial Sequence
  Description of Artificial Sequence: Synthetic oligonucleotide
cagcagcggcaccuggaga

SEQ ID NO: 544 - RNA, 19 nt, Artificial Sequence
  Description of Artificial Sequence: Synthetic oligonucleotide
agcagcggcaccuggagaa

SEQ ID NO: 545 - RNA, 19 nt, Artificial Sequence
  Description of Artificial Sequence: Synthetic oligonucleotide
gcagcggcaccuggagaag

SEQ ID NO: 546 - RNA, 19 nt, Artificial Sequence
  Description of Artificial Sequence: Synthetic oligonucleotide
cagcggcaccuggagaagc

SEQ ID NO: 547 - RNA, 19 nt, Artificial Sequence
  Description of Artificial Sequence: Synthetic oligonucleotide
agcggcaccuggagaagca

SEQ ID NO: 548 - RNA, 19 nt, Artificial Sequence
  Description of Artificial Sequence: Synthetic oligonucleotide
gcggcaccuggagaagcag

SEQ ID NO: 549 - RNA, 19 nt, Artificial Sequence
  Description of Artificial Sequence: Synthetic oligonucleotide
cggcaccuggagaagcagc

SEQ ID NO: 550 - RNA, 19 nt, Artificial Sequence
  Description of Artificial Sequence: Synthetic oligonucleotide
ggcaccuggagaagcagca

SEQ ID NO: 551 - RNA, 19 nt, Artificial Sequence
  Description of Artificial Sequence: Synthetic oligonucleotide
gcaccuggagaagcagcac

SEQ ID NO: 552 - RNA, 19 nt, Artificial Sequence
  Description of Artificial Sequence: Synthetic oligonucleotide
caccuggagaagcagcacc

SEQ ID NO: 553 - RNA, 19 nt, Artificial Sequence
  Description of Artificial Sequence: Synthetic oligonucleotide
accuggagaagcagcaccu

SEQ ID NO: 554 - RNA, 19 nt, Artificial Sequence
  Description of Artificial Sequence: Synthetic oligonucleotide
ccuggagaagcagcaccug

SEQ ID NO: 555 - RNA, 19 nt, Artificial Sequence
  Description of Artificial Sequence: Synthetic oligonucleotide
cuggagaagcagcaccugc

SEQ ID NO: 556 - RNA, 19 nt, Artificial Sequence
  Description of Artificial Sequence: Synthetic oligonucleotide
uggagaagcagcaccugcg

SEQ ID NO: 557 - RNA, 19 nt, Artificial Sequence
  Description of Artificial Sequence: Synthetic oligonucleotide
ggagaagcagcaccugcga

SEQ ID NO: 558 - RNA, 19 nt, Artificial Sequence
  Description of Artificial Sequence: Synthetic oligonucleotide
gagaagcagcaccugcgaa

SEQ ID NO: 559 - RNA, 19 nt, Artificial Sequence
  Description of Artificial Sequence: Synthetic oligonucleotide
agaagcagcaccugcgaau

SEQ ID NO: 560 - RNA, 19 nt, Artificial Sequence
  Description of Artificial Sequence: Synthetic oligonucleotide
gaagcagcaccugcgaauu

SEQ ID NO: 561 - RNA, 19 nt, Artificial Sequence
  Description of Artificial Sequence: Synthetic oligonucleotide
aagcagcaccugcgaauuc

SEQ ID NO: 562 - RNA, 19 nt, Artificial Sequence
  Description of Artificial Sequence: Synthetic oligonucleotide
agcagcaccugcgaauuca

SEQ ID NO: 563 - RNA, 19 nt, Artificial Sequence
  Description of Artificial Sequence: Synthetic oligonucleotide
gcagcaccugcgaauucag

SEQ ID NO: 564 - RNA, 19 nt, Artificial Sequence
  Description of Artificial Sequence: Synthetic oligonucleotide
cagcaccugcgaauucagc

SEQ ID NO: 565 - RNA, 19 nt, Artificial Sequence
  Description of Artificial Sequence: Synthetic oligonucleotide
agcaccugcgaauucagca

SEQ ID NO: 566 - RNA, 19 nt, Artificial Sequence
  Description of Artificial Sequence: Synthetic oligonucleotide
gcaccugcgaauucagcau

SEQ ID NO: 567 - RNA, 19 nt, Artificial Sequence
  Description of Artificial Sequence: Synthetic oligonucleotide
caccugcgaauucagcauc

SEQ ID NO: 568 - RNA, 19 nt, Artificial Sequence
  Description of Artificial Sequence: Synthetic oligonucleotide
accugcgaauucagcaucu

SEQ ID NO: 569 - RNA, 19 nt, Artificial Sequence
  Description of Artificial Sequence: Synthetic oligonucleotide
ccugcgaauucagcaucug

SEQ ID NO: 570 - RNA, 19 nt, Artificial Sequence
  Description of Artificial Sequence: Synthetic oligonucleotide
cugcgaauucagcaucugc

SEQ ID NO: 571 - RNA, 19 nt, Artificial Sequence
  Description of Artificial Sequence: Synthetic oligonucleotide
ugcgaauucagcaucugca

SEQ ID NO: 572 - RNA, 19 nt, Artificial Sequence
  Description of Artificial Sequence: Synthetic oligonucleotide
gcgaauucagcaucugcaa

SEQ ID NO: 573 - RNA, 19 nt, Artificial Sequence
  Description of Artificial Sequence: Synthetic oligonucleotide
cgaauucagcaucugcaaa

SEQ ID NO: 574 - RNA, 19 nt, Artificial Sequence
  Description of Artificial Sequence: Synthetic oligonucleotide
gaauucagcaucugcaaag

SEQ ID NO: 575 - RNA, 19 nt, Artificial Sequence
  Description of Artificial Sequence: Synthetic oligonucleotide
aauucagcaucugcaaagc

SEQ ID NO: 576 - RNA, 19 nt, Artificial Sequence
  Description of Artificial Sequence: Synthetic oligonucleotide
auucagcaucugcaaagcc

SEQ ID NO: 577 - RNA, 19 nt, Artificial Sequence
  Description of Artificial Sequence: Synthetic oligonucleotide
uucagcaucugcaaagcca

SEQ ID NO: 578 - RNA, 19 nt, Artificial Sequence
  Description of Artificial Sequence: Synthetic oligonucleotide
ucagcaucugcaaagccag

SEQ ID NO: 579 - RNA, 19 nt, Artificial Sequence
  Description of Artificial Sequence: Synthetic oligonucleotide
cagcaucugcaaagccagu

SEQ ID NO: 580 - RNA, 19 nt, Artificial Sequence
  Description of Artificial Sequence: Synthetic oligonucleotide
agcaucugcaaagccaguu

SEQ ID NO: 581 - RNA, 19 nt, Artificial Sequence
  Description of Artificial Sequence: Synthetic oligonucleotide
gcaucugcaaagccaguuu

SEQ ID NO: 582 - RNA, 19 nt, Artificial Sequence
  Description of Artificial Sequence: Synthetic oligonucleotide
caucugcaaagccaguuug

SEQ ID NO: 583 - RNA, 19 nt, Artificial Sequence
  Description of Artificial Sequence: Synthetic oligonucleotide
aucugcaaagccaguuugg

SEQ ID NO: 584 - RNA, 19 nt, Artificial Sequence
  Description of Artificial Sequence: Synthetic oligonucleotide
ucugcaaagccaguuuggc

SEQ ID NO: 585 - RNA, 19 nt, Artificial Sequence
  Description of Artificial Sequence: Synthetic oligonucleotide
cugcaaagccaguuuggcc

SEQ ID NO: 586 - RNA, 19 nt, Artificial Sequence
  Description of Artificial Sequence: Synthetic oligonucleotide
ugcaaagccaguuuggccu

SEQ ID NO: 587 - RNA, 19 nt, Artificial Sequence
  Description of Artificial Sequence: Synthetic oligonucleotide
gcaaagccaguuuggccuc

SEQ ID NO: 588 - RNA, 19 nt, Artificial Sequence
  Description of Artificial Sequence: Synthetic oligonucleotide
caaagccaguuuggccucc

SEQ ID NO: 589 - RNA, 19 nt, Artificial Sequence
  Description of Artificial Sequence: Synthetic oligonucleotide
aaagccaguuuggccuccu

SEQ ID NO: 590 - RNA, 19 nt, Artificial Sequence
  Description of Artificial Sequence: Synthetic oligonucleotide
aagccaguuuggccuccug

SEQ ID NO: 591 - RNA, 19 nt, Artificial Sequence
  Description of Artificial Sequence: Synthetic oligonucleotide
agccaguuuggccuccugg

SEQ ID NO: 592 - RNA, 19 nt, Artificial Sequence
  Description of Artificial Sequence: Synthetic oligonucleotide
gccaguuuggccuccugga

SEQ ID NO: 593 - RNA, 19 nt, Artificial Sequence
  Description of Artificial Sequence: Synthetic oligonucleotide
ccaguuuggccuccuggac

SEQ ID NO: 594 - RNA, 19 nt, Artificial Sequence
  Description of Artificial Sequence: Synthetic oligonucleotide
caguuuggccuccuggacc

SEQ ID NO: 595 - RNA, 19 nt, Artificial Sequence
  Description of Artificial Sequence: Synthetic oligonucleotide
aguuuggccuccuggacca

SEQ ID NO: 596 - RNA, 19 nt, Artificial Sequence
  Description of Artificial Sequence: Synthetic oligonucleotide
guuuggccuccuggaccac

SEQ ID NO: 597 - RNA, 19 nt, Artificial Sequence
  Description of Artificial Sequence: Synthetic oligonucleotide
uuuggccuccuggaccaca

SEQ ID NO: 598 - RNA, 19 nt, Artificial Sequence
  Description of Artificial Sequence: Synthetic oligonucleotide
uuggccuccuggaccacaa

SEQ ID NO: 599 - RNA, 19 nt, Artificial Sequence
  Description of Artificial Sequence: Synthetic oligonucleotide
uggccuccuggaccacaag

SEQ ID NO: 600 - RNA, 19 nt, Artificial Sequence
  Description of Artificial Sequence: Synthetic oligonucleotide
ggccuccuggaccacaagc

SEQ ID NO: 601 - RNA, 19 nt, Artificial Sequence
  Description of Artificial Sequence: Synthetic oligonucleotide
gccuccuggaccacaagca

SEQ ID NO: 602 - RNA, 19 nt, Artificial Sequence
  Description of Artificial Sequence: Synthetic oligonucleotide
ccuccuggaccacaagcac

SEQ ID NO: 603 - RNA, 19 nt, Artificial Sequence
  Description of Artificial Sequence: Synthetic oligonucleotide
cuccuggaccacaagcacc

SEQ ID NO: 604 - RNA, 19 nt, Artificial Sequence
  Description of Artificial Sequence: Synthetic oligonucleotide
uccuggaccacaagcaccu

SEQ ID NO: 605 - RNA, 19 nt, Artificial Sequence
  Description of Artificial Sequence: Synthetic oligonucleotide
ccuggaccacaagcaccua

SEQ ID NO: 606 - RNA, 19 nt, Artificial Sequence
  Description of Artificial Sequence: Synthetic oligonucleotide
cuggaccacaagcaccuag

SEQ ID NO: 607 - RNA, 19 nt, Artificial Sequence
  Description of Artificial Sequence: Synthetic oligonucleotide
uggaccacaagcaccuaga

SEQ ID NO: 608 - RNA, 19 nt, Artificial Sequence
  Description of Artificial Sequence: Synthetic oligonucleotide
ggaccacaagcaccuagac

SEQ ID NO: 609 - RNA, 19 nt, Artificial Sequence
  Description of Artificial Sequence: Synthetic oligonucleotide
gaccacaagcaccuagacc

SEQ ID NO: 610 - RNA, 19 nt, Artificial Sequence
  Description of Artificial Sequence: Synthetic oligonucleotide
accacaagcaccuagacca

SEQ ID NO: 611 - RNA, 19 nt, Artificial Sequence
  Description of Artificial Sequence: Synthetic oligonucleotide
ccacaagcaccuagaccau

SEQ ID NO: 612 - RNA, 19 nt, Artificial Sequence
  Description of Artificial Sequence: Synthetic oligonucleotide
cacaagcaccuagaccaug

SEQ ID NO: 613 - RNA, 19 nt, Artificial Sequence
  Description of Artificial Sequence: Synthetic oligonucleotide
acaagcaccuagaccauga

SEQ ID NO: 614 - RNA, 19 nt, Artificial Sequence
  Description of Artificial Sequence: Synthetic oligonucleotide
caagcaccuagaccaugag

SEQ ID NO: 615 - RNA, 19 nt, Artificial Sequence
  Description of Artificial Sequence: Synthetic oligonucleotide
aagcaccuagaccaugagg

SEQ ID NO: 616 - RNA, 19 nt, Artificial Sequence
  Description of Artificial Sequence: Synthetic oligonucleotide
agcaccuagaccaugaggu

SEQ ID NO: 617 - RNA, 19 nt, Artificial Sequence
  Description of Artificial Sequence: Synthetic oligonucleotide
gcaccuagaccaugaggug

SEQ ID NO: 618 - RNA, 19 nt, Artificial Sequence
  Description of Artificial Sequence: Synthetic oligonucleotide
caccuagaccaugaggugg

SEQ ID NO: 619 - RNA, 19 nt, Artificial Sequence
  Description of Artificial Sequence: Synthetic oligonucleotide
accuagaccaugagguggc

SEQ ID NO: 620 - RNA, 19 nt, Artificial Sequence
  Description of Artificial Sequence: Synthetic oligonucleotide
ccuagaccaugagguggcc

SEQ ID NO: 621 - RNA, 19 nt, Artificial Sequence
  Description of Artificial Sequence: Synthetic oligonucleotide
cuagaccaugagguggcca

SEQ ID NO: 622 - RNA, 19 nt, Artificial Sequence
  Description of Artificial Sequence: Synthetic oligonucleotide
uagaccaugagguggccaa

SEQ ID NO: 623 - RNA, 19 nt, Artificial Sequence
  Description of Artificial Sequence: Synthetic oligonucleotide
agaccaugagguggccaag

SEQ ID NO: 624 - RNA, 19 nt, Artificial Sequence
  Description of Artificial Sequence: Synthetic oligonucleotide
gaccaugagguggccaagc

SEQ ID NO: 625 - RNA, 19 nt, Artificial Sequence
  Description of Artificial Sequence: Synthetic oligonucleotide
accaugagguggccaagcc

SEQ ID NO: 626 - RNA, 19 nt, Artificial Sequence
  Description of Artificial Sequence: Synthetic oligonucleotide
ccaugagguggccaagccu

SEQ ID NO: 627 - RNA, 19 nt, Artificial Sequence
  Description of Artificial Sequence: Synthetic oligonucleotide
caugagguggccaagccug

SEQ ID NO: 628 - RNA, 19 nt, Artificial Sequence
  Description of Artificial Sequence: Synthetic oligonucleotide
augagguggccaagccugc

SEQ ID NO: 629 - RNA, 19 nt, Artificial Sequence
  Description of Artificial Sequence: Synthetic oligonucleotide
ugagguggccaagccugcc

SEQ ID NO: 630 - RNA, 19 nt, Artificial Sequence
  Description of Artificial Sequence: Synthetic oligonucleotide
gagguggccaagccugccc

SEQ ID NO: 631 - RNA, 19 nt, Artificial Sequence
  Description of Artificial Sequence: Synthetic oligonucleotide
agguggccaagccugcccg

SEQ ID NO: 632 - RNA, 19 nt, Artificial Sequence
  Description of Artificial Sequence: Synthetic oligonucleotide
gguggccaagccugcccga

SEQ ID NO: 633 - RNA, 19 nt, Artificial Sequence
  Description of Artificial Sequence: Synthetic oligonucleotide
guggccaagccugcccgaa

SEQ ID NO: 634 - RNA, 19 nt, Artificial Sequence
  Description of Artificial Sequence: Synthetic oligonucleotide
uggccaagccugcccgaag

SEQ ID NO: 635 - RNA, 19 nt, Artificial Sequence
  Description of Artificial Sequence: Synthetic oligonucleotide
ggccaagccugcccgaaga

SEQ ID NO: 636 - RNA, 19 nt, Artificial Sequence
  Description of Artificial Sequence: Synthetic oligonucleotide
gccaagccugcccgaagaa

SEQ ID NO: 637 - RNA, 19 nt, Artificial Sequence
  Description of Artificial Sequence: Synthetic oligonucleotide
ccaagccugcccgaagaaa

SEQ ID NO: 638 - RNA, 19 nt, Artificial Sequence
  Description of Artificial Sequence: Synthetic oligonucleotide
caagccugcccgaagaaag

SEQ ID NO: 639 - RNA, 19 nt, Artificial Sequence
  Description of Artificial Sequence: Synthetic oligonucleotide
aagccugcccgaagaaaga

SEQ ID NO: 640 - RNA, 19 nt, Artificial Sequence
  Description of Artificial Sequence: Synthetic oligonucleotide
agccugcccgaagaaagag

SEQ ID NO: 641 - RNA, 19 nt, Artificial Sequence
  Description of Artificial Sequence: Synthetic oligonucleotide
gccugcccgaagaaagagg

SEQ ID NO: 642 - RNA, 19 nt, Artificial Sequence
  Description of Artificial Sequence: Synthetic oligonucleotide
ccugcccgaagaaagaggc

SEQ ID NO: 643 - RNA, 19 nt, Artificial Sequence
  Description of Artificial Sequence: Synthetic oligonucleotide
cugcccgaagaaagaggcu

SEQ ID NO: 644 - RNA, 19 nt, Artificial Sequence
  Description of Artificial Sequence: Synthetic oligonucleotide
ugcccgaagaaagaggcug

SEQ ID NO: 645 - RNA, 19 nt, Artificial Sequence
  Description of Artificial Sequence: Synthetic oligonucleotide
gcccgaagaaagaggcugc

SEQ ID NO: 646 - RNA, 19 nt, Artificial Sequence
  Description of Artificial Sequence: Synthetic oligonucleotide
cccgaagaaagaggcugcc

SEQ ID NO: 647 - RNA, 19 nt, Artificial Sequence
  Description of Artificial Sequence: Synthetic oligonucleotide
ccgaagaaagaggcugccc

SEQ ID NO: 648 - RNA, 19 nt, Artificial Sequence
  Description of Artificial Sequence: Synthetic oligonucleotide
cgaagaaagaggcugcccg

SEQ ID NO: 649 - RNA, 19 nt, Artificial Sequence
  Description of Artificial Sequence: Synthetic oligonucleotide
gaagaaagaggcugcccga

SEQ ID NO: 650 - RNA, 19 nt, Artificial Sequence
  Description of Artificial Sequence: Synthetic oligonucleotide
aagaaagaggcugcccgag

SEQ ID NO: 651 - RNA, 19 nt, Artificial Sequence
  Description of Artificial Sequence: Synthetic oligonucleotide
agaaagaggcugcccgaga

SEQ ID NO: 652 - RNA, 19 nt, Artificial Sequence
  Description of Artificial Sequence: Synthetic oligonucleotide
gaaagaggcugcccgagau

SEQ ID NO: 653 - RNA, 19 nt, Artificial Sequence
  Description of Artificial Sequence: Synthetic oligonucleotide
aaagaggcugcccgagaug

SEQ ID NO: 654 - RNA, 19 nt, Artificial Sequence
  Description of Artificial Sequence: Synthetic oligonucleotide
aagaggcugcccgagaugg

SEQ ID NO: 655 - RNA, 19 nt, Artificial Sequence
  Description of Artificial Sequence: Synthetic oligonucleotide
agaggcugcccgagauggc

SEQ ID NO: 656 - RNA, 19 nt, Artificial Sequence
  Description of Artificial Sequence: Synthetic oligonucleotide
gaggcugcccgagauggcc

SEQ ID NO: 657 - RNA, 19 nt, Artificial Sequence
  Description of Artificial Sequence: Synthetic oligonucleotide
aggcugcccgagauggccc

SEQ ID NO: 658 - RNA, 19 nt, Artificial Sequence
  Description of Artificial Sequence: Synthetic oligonucleotide
ggcugcccgagauggccca

SEQ ID NO: 659 - RNA, 19 nt, Artificial Sequence
  Description of Artificial Sequence: Synthetic oligonucleotide
gcugcccgagauggcccag

SEQ ID NO: 660 - RNA, 19 nt, Artificial Sequence
  Description of Artificial Sequence: Synthetic oligonucleotide
cugcccgagauggcccagc

SEQ ID NO: 661 - RNA, 19 nt, Artificial Sequence
  Description of Artificial Sequence: Synthetic oligonucleotide
ugcccgagauggcccagcc

SEQ ID NO: 662 - RNA, 19 nt, Artificial Sequence
  Description of Artificial Sequence: Synthetic oligonucleotide
gcccgagauggcccagcca

SEQ ID NO: 663 - RNA, 19 nt, Artificial Sequence
  Description of Artificial Sequence: Synthetic oligonucleotide
cccgagauggcccagccag

SEQ ID NO: 664 - RNA, 19 nt, Artificial Sequence
  Description of Artificial Sequence: Synthetic oligonucleotide
ccgagauggcccagccagu

SEQ ID NO: 665 - RNA, 19 nt, Artificial Sequence
  Description of Artificial Sequence: Synthetic oligonucleotide
cgagauggcccagccaguu

SEQ ID NO: 666 - RNA, 19 nt, Artificial Sequence
  Description of Artificial Sequence: Synthetic oligonucleotide
gagauggcccagccaguug

SEQ ID NO: 667 - RNA, 19 nt, Artificial Sequence
  Description of Artificial Sequence: Synthetic oligonucleotide
agauggcccagccaguuga

SEQ ID NO: 668 - RNA, 19 nt, Artificial Sequence
  Description of Artificial Sequence: Synthetic oligonucleotide
gauggcccagccaguugac

SEQ ID NO: 669 - RNA, 19 nt, Artificial Sequence
  Description of Artificial Sequence: Synthetic oligonucleotide
auggcccagccaguugacc

SEQ ID NO: 670 - RNA, 19 nt, Artificial Sequence
  Description of Artificial Sequence: Synthetic oligonucleotide
uggcccagccaguugaccc

SEQ ID NO: 671 - RNA, 19 nt, Artificial Sequence
  Description of Artificial Sequence: Synthetic oligonucleotide
ggcccagccaguugacccg

SEQ ID NO: 672 - RNA, 19 nt, Artificial Sequence
  Description of Artificial Sequence: Synthetic oligonucleotide
gcccagccaguugacccgg

SEQ ID NO: 673 - RNA, 19 nt, Artificial Sequence
  Description of Artificial Sequence: Synthetic oligonucleotide
cccagccaguugacccggc

SEQ ID NO: 674 - RNA, 19 nt, Artificial Sequence
  Description of Artificial Sequence: Synthetic oligonucleotide
ccagccaguugacccggcu

SEQ ID NO: 675 - RNA, 19 nt, Artificial Sequence
  Description of Artificial Sequence: Synthetic oligonucleotide
cagccaguugacccggcuc

SEQ ID NO: 676 - RNA, 19 nt, Artificial Sequence
  Description of Artificial Sequence: Synthetic oligonucleotide
agccaguugacccggcuca

SEQ ID NO: 677 - RNA, 19 nt, Artificial Sequence
  Description of Artificial Sequence: Synthetic oligonucleotide
gccaguugacccggcucac

SEQ ID NO: 678 - RNA, 19 nt, Artificial Sequence
  Description of Artificial Sequence: Synthetic oligonucleotide
ccaguugacccggcucaca

SEQ ID NO: 679 - RNA, 19 nt, Artificial Sequence
  Description of Artificial Sequence: Synthetic oligonucleotide
caguugacccggcucacaa

SEQ ID NO: 680 - RNA, 19 nt, Artificial Sequence
  Description of Artificial Sequence: Synthetic oligonucleotide
aguugacccggcucacaau

SEQ ID NO: 681 - RNA, 19 nt, Artificial Sequence
  Description of Artificial Sequence: Synthetic oligonucleotide
guugacccggcucacaaug

SEQ ID NO: 682 - RNA, 19 nt, Artificial Sequence
  Description of Artificial Sequence: Synthetic oligonucleotide
uugacccggcucacaaugu

SEQ ID NO: 683 - RNA, 19 nt, Artificial Sequence
  Description of Artificial Sequence: Synthetic oligonucleotide
ugacccggcucacaauguc

SEQ ID NO: 684 - RNA, 19 nt, Artificial Sequence
  Description of Artificial Sequence: Synthetic oligonucleotide
gacccggcucacaauguca

SEQ ID NO: 685 - RNA, 19 nt, Artificial Sequence
  Description of Artificial Sequence: Synthetic oligonucleotide
acccggcucacaaugucag

SEQ ID NO: 686 - RNA, 19 nt, Artificial Sequence
  Description of Artificial Sequence: Synthetic oligonucleotide
cccggcucacaaugucagc

SEQ ID NO: 687 - RNA, 19 nt, Artificial Sequence
  Description of Artificial Sequence: Synthetic oligonucleotide
ccggcucacaaugucagcc

SEQ ID NO: 688 - RNA, 19 nt, Artificial Sequence
  Description of Artificial Sequence: Synthetic oligonucleotide
cggcucacaaugucagccg

SEQ ID NO: 689 - RNA, 19 nt, Artificial Sequence
  Description of Artificial Sequence: Synthetic oligonucleotide
ggcucacaaugucagccgc

SEQ ID NO: 690 - RNA, 19 nt, Artificial Sequence
  Description of Artificial Sequence: Synthetic oligonucleotide
gcucacaaugucagccgcc

SEQ ID NO: 691 - RNA, 19 nt, Artificial Sequence
  Description of Artificial Sequence: Synthetic oligonucleotide
cucacaaugucagccgccu

SEQ ID NO: 692 - RNA, 19 nt, Artificial Sequence
  Description of Artificial Sequence: Synthetic oligonucleotide
ucacaaugucagccgccug

SEQ ID NO: 693 - RNA, 19 nt, Artificial Sequence
  Description of Artificial Sequence: Synthetic oligonucleotide
cacaaugucagccgccugc

SEQ ID NO: 694 - RNA, 19 nt, Artificial Sequence
  Description of Artificial Sequence: Synthetic oligonucleotide
acaaugucagccgccugca

SEQ ID NO: 695 - RNA, 19 nt, Artificial Sequence
  Description of Artificial Sequence: Synthetic oligonucleotide
caaugucagccgccugcac

SEQ ID NO: 696 - RNA, 19 nt, Artificial Sequence
  Description of Artificial Sequence: Synthetic oligonucleotide
aaugucagccgccugcacc

SEQ ID NO: 697 - RNA, 19 nt, Artificial Sequence
  Description of Artificial Sequence: Synthetic oligonucleotide
augucagccgccugcaccg

SEQ ID NO: 698 - RNA, 19 nt, Artificial Sequence
  Description of Artificial Sequence: Synthetic oligonucleotide
ugucagccgccugcaccgg

SEQ ID NO: 699 - RNA, 19 nt, Artificial Sequence
  Description of Artificial Sequence: Synthetic oligonucleotide
gucagccgccugcaccggc

SEQ ID NO: 700 - RNA, 19 nt, Artificial Sequence
  Description of Artificial Sequence: Synthetic oligonucleotide
ucagccgccugcaccggcu

SEQ ID NO: 701 - RNA, 19 nt, Artificial Sequence
  Description of Artificial Sequence: Synthetic oligonucleotide
cagccgccugcaccggcug

SEQ ID NO: 702 - RNA, 19 nt, Artificial Sequence
  Description of Artificial Sequence: Synthetic oligonucleotide
agccgccugcaccggcugc

SEQ ID NO: 703 - RNA, 19 nt, Artificial Sequence
  Description of Artificial Sequence: Synthetic oligonucleotide
gccgccugcaccggcugcc

SEQ ID NO: 704 - RNA, 19 nt, Artificial Sequence
  Description of Artificial Sequence: Synthetic oligonucleotide
ccgccugcaccggcugccc

SEQ ID NO: 705 - RNA, 19 nt, Artificial Sequence
  Description of Artificial Sequence: Synthetic oligonucleotide
cgccugcaccggcugccca

SEQ ID NO: 706 - RNA, 19 nt, Artificial Sequence
  Description of Artificial Sequence: Synthetic oligonucleotide
gccugcaccggcugcccag

SEQ ID NO: 707 - RNA, 19 nt, Artificial Sequence
  Description of Artificial Sequence: Synthetic oligonucleotide
ccugcaccggcugcccagg

SEQ ID NO: 708 - RNA, 19 nt, Artificial Sequence
  Description of Artificial Sequence: Synthetic oligonucleotide
cugcaccggcugcccaggg

SEQ ID NO: 709 - RNA, 19 nt, Artificial Sequence
  Description of Artificial Sequence: Synthetic oligonucleotide
ugcaccggcugcccaggga

SEQ ID NO: 710 - RNA, 19 nt, Artificial Sequence
  Description of Artificial Sequence: Synthetic oligonucleotide
gcaccggcugcccagggau

SEQ ID NO: 711 - RNA, 19 nt, Artificial Sequence
  Description of Artificial Sequence: Synthetic oligonucleotide
caccggcugcccagggauu

SEQ ID NO: 712 - RNA, 19 nt, Artificial Sequence
  Description of Artificial Sequence: Synthetic oligonucleotide
accggcugcccagggauug

SEQ ID NO: 713 - RNA, 19 nt, Artificial Sequence
  Description of Artificial Sequence: Synthetic oligonucleotide
ccggcugcccagggauugc

SEQ ID NO: 714 - RNA, 19 nt, Artificial Sequence
  Description of Artificial Sequence: Synthetic oligonucleotide
cggcugcccagggauugcc

SEQ ID NO: 715 - RNA, 19 nt, Artificial Sequence
  Description of Artificial Sequence: Synthetic oligonucleotide
ggcugcccagggauugcca

SEQ ID NO: 716 - RNA, 19 nt, Artificial Sequence
  Description of Artificial Sequence: Synthetic oligonucleotide
gcugcccagggauugccag

SEQ ID NO: 717 - RNA, 19 nt, Artificial Sequence
  Description of Artificial Sequence: Synthetic oligonucleotide
cugcccagggauugccagg

SEQ ID NO: 718 - RNA, 19 nt, Artificial Sequence
  Description of Artificial Sequence: Synthetic oligonucleotide
ugcccagggauugccagga

SEQ ID NO: 719 - RNA, 19 nt, Artificial Sequence
  Description of Artificial Sequence: Synthetic oligonucleotide
gcccagggauugccaggag

SEQ ID NO: 720 - RNA, 19 nt, Artificial Sequence
  Description of Artificial Sequence: Synthetic oligonucleotide
cccagggauugccaggagc

SEQ ID NO: 721 - RNA, 19 nt, Artificial Sequence
  Description of Artificial Sequence: Synthetic oligonucleotide
ccagggauugccaggagcu

SEQ ID NO: 722 - RNA, 19 nt, Artificial Sequence
  Description of Artificial Sequence: Synthetic oligonucleotide
cagggauugccaggagcug

SEQ ID NO: 723 - RNA, 19 nt, Artificial Sequence
  Description of Artificial Sequence: Synthetic oligonucleotide
agggauugccaggagcugu

SEQ ID NO: 724 - RNA, 19 nt, Artificial Sequence
  Description of Artificial Sequence: Synthetic oligonucleotide
gggauugccaggagcuguu

SEQ ID NO: 725 - RNA, 19 nt, Artificial Sequence
  Description of Artificial Sequence: Synthetic oligonucleotide
ggauugccaggagcuguuc

SEQ ID NO: 726 - RNA, 19 nt, Artificial Sequence
  Description of Artificial Sequence: Synthetic oligonucleotide
gauugccaggagcuguucc

SEQ ID NO: 727 - RNA, 19 nt, Artificial Sequence
  Description of Artificial Sequence: Synthetic oligonucleotide
auugccaggagcuguucca

SEQ ID NO: 728 - RNA, 19 nt, Artificial Sequence
  Description of Artificial Sequence: Synthetic oligonucleotide
uugccaggagcuguuccag

SEQ ID NO: 729 - RNA, 19 nt, Artificial Sequence
  Description of Artificial Sequence: Synthetic oligonucleotide
ugccaggagcuguuccagg

SEQ ID NO: 730 - RNA, 19 nt, Artificial Sequence
  Description of Artificial Sequence: Synthetic oligonucleotide
gccaggagcuguuccaggu

SEQ ID NO: 731 - RNA, 19 nt, Artificial Sequence
  Description of Artificial Sequence: Synthetic oligonucleotide
ccaggagcuguuccagguu

SEQ ID NO: 732 - RNA, 19 nt, Artificial Sequence
  Description of Artificial Sequence: Synthetic oligonucleotide
caggagcuguuccagguug

SEQ ID NO: 733 - RNA, 19 nt, Artificial Sequence
  Description of Artificial Sequence: Synthetic oligonucleotide
aggagcuguuccagguugg

SEQ ID NO: 734 - RNA, 19 nt, Artificial Sequence
  Description of Artificial Sequence: Synthetic oligonucleotide
ggagcuguuccagguuggg

SEQ ID NO: 735 - RNA, 19 nt, Artificial Sequence
  Description of Artificial Sequence: Synthetic oligonucleotide
gagcuguuccagguugggg

SEQ ID NO: 736 - RNA, 19 nt, Artificial Sequence
  Description of Artificial Sequence: Synthetic oligonucleotide
agcuguuccagguugggga

SEQ ID NO: 737 - RNA, 19 nt, Artificial Sequence
  Description of Artificial Sequence: Synthetic oligonucleotide
gcuguuccagguuggggag

SEQ ID NO: 738 - RNA, 19 nt, Artificial Sequence
  Description of Artificial Sequence: Synthetic oligonucleotide
cuguuccagguuggggaga

SEQ ID NO: 739 - RNA, 19 nt, Artificial Sequence
  Description of Artificial Sequence: Synthetic oligonucleotide
uguuccagguuggggagag

SEQ ID NO: 740 - RNA, 19 nt, Artificial Sequence
  Description of Artificial Sequence: Synthetic oligonucleotide
guuccagguuggggagagg

SEQ ID NO: 741 - RNA, 19 nt, Artificial Sequence
  Description of Artificial Sequence: Synthetic oligonucleotide
uuccagguuggggagaggc

SEQ ID NO: 742 - RNA, 19 nt, Artificial Sequence
  Description of Artificial Sequence: Synthetic oligonucleotide
uccagguuggggagaggca

SEQ ID NO: 743 - RNA, 19 nt, Artificial Sequence
  Description of Artificial Sequence: Synthetic oligonucleotide
ccagguuggggagaggcag

SEQ ID NO: 744 - RNA, 19 nt, Artificial Sequence
  Description of Artificial Sequence: Synthetic oligonucleotide
cagguuggggagaggcaga

SEQ ID NO: 745 - RNA, 19 nt, Artificial Sequence
  Description of Artificial Sequence: Synthetic oligonucleotide
agguuggggagaggcagag

SEQ ID NO: 746 - RNA, 19 nt, Artificial Sequence
  Description of Artificial Sequence: Synthetic oligonucleotide
gguuggggagaggcagagu

SEQ ID NO: 747 - RNA, 19 nt, Artificial Sequence
  Description of Artificial Sequence: Synthetic oligonucleotide
guuggggagaggcagagug

SEQ ID NO: 748 - RNA, 19 nt, Artificial Sequence
  Description of Artificial Sequence: Synthetic oligonucleotide
uuggggagaggcagagugg

SEQ ID NO: 749 - RNA, 19 nt, Artificial Sequence
  Description of Artificial Sequence: Synthetic oligonucleotide
uggggagaggcagagugga

SEQ ID NO: 750 - RNA, 19 nt, Artificial Sequence
  Description of Artificial Sequence: Synthetic oligonucleotide
ggggagaggcagaguggac

SEQ ID NO: 751 - RNA, 19 nt, Artificial Sequence
  Description of Artificial Sequence: Synthetic oligonucleotide
gggagaggcagaguggacu

SEQ ID NO: 752 - RNA, 19 nt, Artificial Sequence
  Description of Artificial Sequence: Synthetic oligonucleotide
ggagaggcagaguggacua

SEQ ID NO: 753 - RNA, 19 nt, Artificial Sequence
  Description of Artificial Sequence: Synthetic oligonucleotide
gagaggcagaguggacuau

SEQ ID NO: 754 - RNA, 19 nt, Artificial Sequence
  Description of Artificial Sequence: Synthetic oligonucleotide
agaggcagaguggacuauu

SEQ ID NO: 755 - RNA, 19 nt, Artificial Sequence
  Description of Artificial Sequence: Synthetic oligonucleotide
gaggcagaguggacuauuu

SEQ ID NO: 756 - RNA, 19 nt, Artificial Sequence
  Description of Artificial Sequence: Synthetic oligonucleotide
aggcagaguggacuauuug

SEQ ID NO: 757 - RNA, 19 nt, Artificial Sequence
  Description of Artificial Sequence: Synthetic oligonucleotide
ggcagaguggacuauuuga

SEQ ID NO: 758 - RNA, 19 nt, Artificial Sequence
  Description of Artificial Sequence: Synthetic oligonucleotide
gcagaguggacuauuugaa

SEQ ID NO: 759 - RNA, 19 nt, Artificial Sequence
  Description of Artificial Sequence: Synthetic oligonucleotide
cagaguggacuauuugaaa

SEQ ID NO: 760 - RNA, 19 nt, Artificial Sequence
  Description of Artificial Sequence: Synthetic oligonucleotide
agaguggacuauuugaaau

SEQ ID NO: 761 - RNA, 19 nt, Artificial Sequence
  Description of Artificial Sequence: Synthetic oligonucleotide
gaguggacuauuugaaauc

SEQ ID NO: 762 - RNA, 19 nt, Artificial Sequence
  Description of Artificial Sequence: Synthetic oligonucleotide
aguggacuauuugaaaucc

SEQ ID NO: 763 - RNA, 19 nt, Artificial Sequence
  Description of Artificial Sequence: Synthetic oligonucleotide
guggacuauuugaaaucca

SEQ ID NO: 764 - RNA, 19 nt, Artificial Sequence
  Description of Artificial Sequence: Synthetic oligonucleotide
uggacuauuugaaauccag

SEQ ID NO: 765 - RNA, 19 nt, Artificial Sequence
  Description of Artificial Sequence: Synthetic oligonucleotide
ggacuauuugaaauccagc

SEQ ID NO: 766 - RNA, 19 nt, Artificial Sequence
  Description of Artificial Sequence: Synthetic oligonucleotide
gacuauuugaaauccagcc

SEQ ID NO: 767 - RNA, 19 nt, Artificial Sequence
  Description of Artificial Sequence: Synthetic oligonucleotide
acuauuugaaauccagccu

SEQ ID NO: 768 - RNA, 19 nt, Artificial Sequence
  Description of Artificial Sequence: Synthetic oligonucleotide
cuauuugaaauccagccuc

SEQ ID NO: 769 - RNA, 19 nt, Artificial Sequence
  Description of Artificial Sequence: Synthetic oligonucleotide
uauuugaaauccagccuca

SEQ ID NO: 770 - RNA, 19 nt, Artificial Sequence
  Description of Artificial Sequence: Synthetic oligonucleotide
auuugaaauccagccucag

SEQ ID NO: 771 - RNA, 19 nt, Artificial Sequence
  Description of Artificial Sequence: Synthetic oligonucleotide
uuugaaauccagccucagg

SEQ ID NO: 772 - RNA, 19 nt, Artificial Sequence
  Description of Artificial Sequence: Synthetic oligonucleotide
uugaaauccagccucaggg

SEQ ID NO: 773 - RNA, 19 nt, Artificial Sequence
  Description of Artificial Sequence: Synthetic oligonucleotide
ugaaauccagccucagggg

SEQ ID NO: 774 - RNA, 19 nt, Artificial Sequence
  Description of Artificial Sequence: Synthetic oligonucleotide
gaaauccagccucaggggu

SEQ ID NO: 775 - RNA, 19 nt, Artificial Sequence
  Description of Artificial Sequence: Synthetic oligonucleotide
aaauccagccucagggguc

SEQ ID NO: 776 - RNA, 19 nt, Artificial Sequence
  Description of Artificial Sequence: Synthetic oligonucleotide
aauccagccucaggggucu

SEQ ID NO: 777 - RNA, 19 nt, Artificial Sequence
  Description of Artificial Sequence: Synthetic oligonucleotide
auccagccucaggggucuc

SEQ ID NO: 778 - RNA, 19 nt, Artificial Sequence
  Description of Artificial Sequence: Synthetic oligonucleotide
uccagccucaggggucucc

SEQ ID NO: 779 - RNA, 19 nt, Artificial Sequence
  Description of Artificial Sequence: Synthetic oligonucleotide
ccagccucaggggucuccg

SEQ ID NO: 780 - RNA, 19 nt, Artificial Sequence
  Description of Artificial Sequence: Synthetic oligonucleotide
cagccucaggggucuccgc

SEQ ID NO: 781 - RNA, 19 nt, Artificial Sequence
  Description of Artificial Sequence: Synthetic oligonucleotide
agccucaggggucuccgcc

SEQ ID NO: 782 - RNA, 19 nt, Artificial Sequence
  Description of Artificial Sequence: Synthetic oligonucleotide
gccucaggggucuccgcca

SEQ ID NO: 783 - RNA, 19 nt, Artificial Sequence
  Description of Artificial Sequence: Synthetic oligonucleotide
ccucaggggucuccgccau

SEQ ID NO: 784 - RNA, 19 nt, Artificial Sequence
  Description of Artificial Sequence: Synthetic oligonucleotide
cucaggggucuccgccauu

SEQ ID NO: 785 - RNA, 19 nt, Artificial Sequence
  Description of Artificial Sequence: Synthetic oligonucleotide
ucaggggucuccgccauuu

SEQ ID NO: 786 - RNA, 19 nt, Artificial Sequence
  Description of Artificial Sequence: Synthetic oligonucleotide
caggggucuccgccauuuu

SEQ ID NO: 787 - RNA, 19 nt, Artificial Sequence
  Description of Artificial Sequence: Synthetic oligonucleotide
aggggucuccgccauuuuu

SEQ ID NO: 788 - RNA, 19 nt, Artificial Sequence
  Description of Artificial Sequence: Synthetic oligonucleotide
ggggucuccgccauuuuug

SEQ ID NO: 789 - RNA, 19 nt, Artificial Sequence
  Description of Artificial Sequence: Synthetic oligonucleotide
gggucuccgccauuuuugg

SEQ ID NO: 790 - RNA, 19 nt, Artificial Sequence
  Description of Artificial Sequence: Synthetic oligonucleotide
ggucuccgccauuuuuggu

SEQ ID NO: 791 - RNA, 19 nt, Artificial Sequence
  Description of Artificial Sequence: Synthetic oligonucleotide
gucuccgccauuuuuggug

SEQ ID NO: 792 - RNA, 19 nt, Artificial Sequence
  Description of Artificial Sequence: Synthetic oligonucleotide
ucuccgccauuuuugguga

SEQ ID NO: 793 - RNA, 19 nt, Artificial Sequence
  Description of Artificial Sequence: Synthetic oligonucleotide
cuccgccauuuuuggugaa

SEQ ID NO: 794 - RNA, 19 nt, Artificial Sequence
  Description of Artificial Sequence: Synthetic oligonucleotide
uccgccauuuuuggugaac

SEQ ID NO: 795 - RNA, 19 nt, Artificial Sequence
  Description of Artificial Sequence: Synthetic oligonucleotide
ccgccauuuuuggugaacu

SEQ ID NO: 796 - RNA, 19 nt, Artificial Sequence
  Description of Artificial Sequence: Synthetic oligonucleotide
cgccauuuuuggugaacug

SEQ ID NO: 797 - RNA, 19 nt, Artificial Sequence
  Description of Artificial Sequence: Synthetic oligonucleotide
gccauuuuuggugaacugc

SEQ ID NO: 798 - RNA, 19 nt, Artificial Sequence
  Description of Artificial Sequence: Synthetic oligonucleotide
ccauuuuuggugaacugca

SEQ ID NO: 799 - RNA, 19 nt, Artificial Sequence
  Description of Artificial Sequence: Synthetic oligonucleotide
cauuuuuggugaacugcaa

SEQ ID NO: 800 - RNA, 19 nt, Artificial Sequence
  Description of Artificial Sequence: Synthetic oligonucleotide
auuuuuggugaacugcaag

SEQ ID NO: 801 - RNA, 19 nt, Artificial Sequence
  Description of Artificial Sequence: Synthetic oligonucleotide
uuuuuggugaacugcaaga

SEQ ID NO: 802 - RNA, 19 nt, Artificial Sequence
  Description of Artificial Sequence: Synthetic oligonucleotide
uuuuggugaacugcaagau

SEQ ID NO: 803 - RNA, 19 nt, Artificial Sequence
  Description of Artificial Sequence: Synthetic oligonucleotide
uuuggugaacugcaagaug

SEQ ID NO: 804 - RNA, 19 nt, Artificial Sequence
  Description of Artificial Sequence: Synthetic oligonucleotide
uuggugaacugcaagauga

SEQ ID NO: 805 - RNA, 19 nt, Artificial Sequence
  Description of Artificial Sequence: Synthetic oligonucleotide
uggugaacugcaagaugac

SEQ ID NO: 806 - RNA, 19 nt, Artificial Sequence
  Description of Artificial Sequence: Synthetic oligonucleotide
ggugaacugcaagaugacc

SEQ ID NO: 807 - RNA, 19 nt, Artificial Sequence
  Description of Artificial Sequence: Synthetic oligonucleotide
gugaacugcaagaugaccu

SEQ ID NO: 808 - RNA, 19 nt, Artificial Sequence
  Description of Artificial Sequence: Synthetic oligonucleotide
ugaacugcaagaugaccuc

SEQ ID NO: 809 - RNA, 19 nt, Artificial Sequence
  Description of Artificial Sequence: Synthetic oligonucleotide
gaacugcaagaugaccuca

SEQ ID NO: 810 - RNA, 19 nt, Artificial Sequence
  Description of Artificial Sequence: Synthetic oligonucleotide
aacugcaagaugaccucag

SEQ ID NO: 811 - RNA, 19 nt, Artificial Sequence
  Description of Artificial Sequence: Synthetic oligonucleotide
acugcaagaugaccucaga

SEQ ID NO: 812 - RNA, 19 nt, Artificial Sequence
  Description of Artificial Sequence: Synthetic oligonucleotide
cugcaagaugaccucagau

SEQ ID NO: 813 - RNA, 19 nt, Artificial Sequence
  Description of Artificial Sequence: Synthetic oligonucleotide
ugcaagaugaccucagaug

SEQ ID NO: 814 - RNA, 19 nt, Artificial Sequence
  Description of Artificial Sequence: Synthetic oligonucleotide
gcaagaugaccucagaugg

SEQ ID NO: 815 - RNA, 19 nt, Artificial Sequence
  Description of Artificial Sequence: Synthetic oligonucleotide
caagaugaccucagaugga

SEQ ID NO: 816 - RNA, 19 nt, Artificial Sequence
  Description of Artificial Sequence: Synthetic oligonucleotide
aagaugaccucagauggag

SEQ ID NO: 817 - RNA, 19 nt, Artificial Sequence
  Description of Artificial Sequence: Synthetic oligonucleotide
agaugaccucagauggagg

SEQ ID NO: 818 - RNA, 19 nt, Artificial Sequence
  Description of Artificial Sequence: Synthetic oligonucleotide
gaugaccucagauggaggc

SEQ ID NO: 819 - RNA, 19 nt, Artificial Sequence
  Description of Artificial Sequence: Synthetic oligonucleotide
augaccucagauggaggcu

SEQ ID NO: 820 - RNA, 19 nt, Artificial Sequence
  Description of Artificial Sequence: Synthetic oligonucleotide
ugaccucagauggaggcug

SEQ ID NO: 821 - RNA, 19 nt, Artificial Sequence
  Description of Artificial Sequence: Synthetic oligonucleotide
gaccucagauggaggcugg

SEQ ID NO: 822 - RNA, 19 nt, Artificial Sequence
  Description of Artificial Sequence: Synthetic oligonucleotide
accucagauggaggcugga

SEQ ID NO: 823 - RNA, 19 nt, Artificial Sequence
  Description of Artificial Sequence: Synthetic oligonucleotide
ccucagauggaggcuggac

SEQ ID NO: 824 - RNA, 19 nt, Artificial Sequence
  Description of Artificial Sequence: Synthetic oligonucleotide
cucagauggaggcuggaca

SEQ ID NO: 825 - RNA, 19 nt, Artificial Sequence
  Description of Artificial Sequence: Synthetic oligonucleotide
ucagauggaggcuggacag

SEQ ID NO: 826 - RNA, 19 nt, Artificial Sequence
  Description of Artificial Sequence: Synthetic oligonucleotide
cagauggaggcuggacagu

SEQ ID NO: 827 - RNA, 19 nt, Artificial Sequence
  Description of Artificial Sequence: Synthetic oligonucleotide
agauggaggcuggacagua

SEQ ID NO: 828 - RNA, 19 nt, Artificial Sequence
  Description of Artificial Sequence: Synthetic oligonucleotide
gauggaggcuggacaguaa

SEQ ID NO: 829 - RNA, 19 nt, Artificial Sequence
  Description of Artificial Sequence: Synthetic oligonucleotide
auggaggcuggacaguaau

SEQ ID NO: 830 - RNA, 19 nt, Artificial Sequence
  Description of Artificial Sequence: Synthetic oligonucleotide
uggaggcuggacaguaauu

SEQ ID NO: 831 - RNA, 19 nt, Artificial Sequence
  Description of Artificial Sequence: Synthetic oligonucleotide
ggaggcuggacaguaauuc

SEQ ID NO: 832 - RNA, 19 nt, Artificial Sequence
  Description of Artificial Sequence: Synthetic oligonucleotide
gaggcuggacaguaauuca

SEQ ID NO: 833 - RNA, 19 nt, Artificial Sequence
  Description of Artificial Sequence: Synthetic oligonucleotide
aggcuggacaguaauucag

SEQ ID NO: 834 - RNA, 19 nt, Artificial Sequence
  Description of Artificial Sequence: Synthetic oligonucleotide
ggcuggacaguaauucaga

SEQ ID NO: 835 - RNA, 19 nt, Artificial Sequence
  Description of Artificial Sequence: Synthetic oligonucleotide
gcuggacaguaauucagag

SEQ ID NO: 836 - RNA, 19 nt, Artificial Sequence
  Description of Artificial Sequence: Synthetic oligonucleotide
cuggacaguaauucagagg

SEQ ID NO: 837 - RNA, 19 nt, Artificial Sequence
  Description of Artificial Sequence: Synthetic oligonucleotide
uggacaguaauucagaggc

SEQ ID NO: 838 - RNA, 19 nt, Artificial Sequence
  Description of Artificial Sequence: Synthetic oligonucleotide
ggacaguaauucagaggcg

SEQ ID NO: 839 - RNA, 19 nt, Artificial Sequence
  Description of Artificial Sequence: Synthetic oligonucleotide
gacaguaauucagaggcgc

SEQ ID NO: 840 - RNA, 19 nt, Artificial Sequence
  Description of Artificial Sequence: Synthetic oligonucleotide
acaguaauucagaggcgcc

SEQ ID NO: 841 - RNA, 19 nt, Artificial Sequence
  Description of Artificial Sequence: Synthetic oligonucleotide
caguaauucagaggcgcca

SEQ ID NO: 842 - RNA, 19 nt, Artificial Sequence
  Description of Artificial Sequence: Synthetic oligonucleotide
aguaauucagaggcgccac

SEQ ID NO: 843 - RNA, 19 nt, Artificial Sequence
  Description of Artificial Sequence: Synthetic oligonucleotide
guaauucagaggcgccacg

SEQ ID NO: 844 - RNA, 19 nt, Artificial Sequence
  Description of Artificial Sequence: Synthetic oligonucleotide
uaauucagaggcgccacga

SEQ ID NO: 845 - RNA, 19 nt, Artificial Sequence
  Description of Artificial Sequence: Synthetic oligonucleotide
aauucagaggcgccacgau

SEQ ID NO: 846 - RNA, 19 nt, Artificial Sequence
  Description of Artificial Sequence: Synthetic oligonucleotide
auucagaggcgccacgaug

SEQ ID NO: 847 - RNA, 19 nt, Artificial Sequence
  Description of Artificial Sequence: Synthetic oligonucleotide
uucagaggcgccacgaugg

SEQ ID NO: 848 - RNA, 19 nt, Artificial Sequence
  Description of Artificial Sequence: Synthetic oligonucleotide
ucagaggcgccacgauggc

SEQ ID NO: 849 - RNA, 19 nt, Artificial Sequence
  Description of Artificial Sequence: Synthetic oligonucleotide
cagaggcgccacgauggcu

SEQ ID NO: 850 - RNA, 19 nt, Artificial Sequence
  Description of Artificial Sequence: Synthetic oligonucleotide
agaggcgccacgauggcuc

SEQ ID NO: 851 - RNA, 19 nt, Artificial Sequence
  Description of Artificial Sequence: Synthetic oligonucleotide
gaggcgccacgauggcuca

SEQ ID NO: 852 - RNA, 19 nt, Artificial Sequence
  Description of Artificial Sequence: Synthetic oligonucleotide
aggcgccacgauggcucag

SEQ ID NO: 853 - RNA, 19 nt, Artificial Sequence
  Description of Artificial Sequence: Synthetic oligonucleotide
ggcgccacgauggcucagu

SEQ ID NO: 854 - RNA, 19 nt, Artificial Sequence
  Description of Artificial Sequence: Synthetic oligonucleotide
gcgccacgauggcucagug

SEQ ID NO: 855 - RNA, 19 nt, Artificial Sequence
  Description of Artificial Sequence: Synthetic oligonucleotide
cgccacgauggcucagugg

SEQ ID NO: 856 - RNA, 19 nt, Artificial Sequence
  Description of Artificial Sequence: Synthetic oligonucleotide
gccacgauggcucagugga

SEQ ID NO: 857 - RNA, 19 nt, Artificial Sequence
  Description of Artificial Sequence: Synthetic oligonucleotide
ccacgauggcucaguggac

SEQ ID NO: 858 - RNA, 19 nt, Artificial Sequence
  Description of Artificial Sequence: Synthetic oligonucleotide
cacgauggcucaguggacu

SEQ ID NO: 859 - RNA, 19 nt, Artificial Sequence
  Description of Artificial Sequence: Synthetic oligonucleotide
acgauggcucaguggacuu

SEQ ID NO: 860 - RNA, 19 nt, Artificial Sequence
  Description of Artificial Sequence: Synthetic oligonucleotide
cgauggcucaguggacuuc

SEQ ID NO: 861 - RNA, 19 nt, Artificial Sequence
  Description of Artificial Sequence: Synthetic oligonucleotide
gauggcucaguggacuuca

SEQ ID NO: 862 - RNA, 19 nt, Artificial Sequence
  Description of Artificial Sequence: Synthetic oligonucleotide
auggcucaguggacuucaa

SEQ ID NO: 863 - RNA, 19 nt, Artificial Sequence
  Description of Artificial Sequence: Synthetic oligonucleotide
uggcucaguggacuucaac

SEQ ID NO: 864 - RNA, 19 nt, Artificial Sequence
  Description of Artificial Sequence: Synthetic oligonucleotide
ggcucaguggacuucaacc

SEQ ID NO: 865 - RNA, 19 nt, Artificial Sequence
  Description of Artificial Sequence: Synthetic oligonucleotide
gcucaguggacuucaaccg

SEQ ID NO: 866 - RNA, 19 nt, Artificial Sequence
  Description of Artificial Sequence: Synthetic oligonucleotide
cucaguggacuucaaccgg

SEQ ID NO: 867 - RNA, 19 nt, Artificial Sequence
  Description of Artificial Sequence: Synthetic oligonucleotide
ucaguggacuucaaccggc

SEQ ID NO: 868 - RNA, 19 nt, Artificial Sequence
  Description of Artificial Sequence: Synthetic oligonucleotide
caguggacuucaaccggcc

SEQ ID NO: 869 - RNA, 19 nt, Artificial Sequence
  Description of Artificial Sequence: Synthetic oligonucleotide
aguggacuucaaccggccc

SEQ ID NO: 870 - RNA, 19 nt, Artificial Sequence
  Description of Artificial Sequence: Synthetic oligonucleotide
guggacuucaaccggcccu

SEQ ID NO: 871 - RNA, 19 nt, Artificial Sequence
  Description of Artificial Sequence: Synthetic oligonucleotide
uggacuucaaccggcccug

SEQ ID NO: 872 - RNA, 19 nt, Artificial Sequence
  Description of Artificial Sequence: Synthetic oligonucleotide
ggacuucaaccggcccugg

SEQ ID NO: 873 - RNA, 19 nt, Artificial Sequence
  Description of Artificial Sequence: Synthetic oligonucleotide
gacuucaaccggcccuggg

SEQ ID NO: 874 - RNA, 19 nt, Artificial Sequence
  Description of Artificial Sequence: Synthetic oligonucleotide
acuucaaccggcccuggga

SEQ ID NO: 875 - RNA, 19 nt, Artificial Sequence
  Description of Artificial Sequence: Synthetic oligonucleotide
cuucaaccggcccugggaa

SEQ ID NO: 876 - RNA, 19 nt, Artificial Sequence
  Description of Artificial Sequence: Synthetic oligonucleotide
uucaaccggcccugggaag

SEQ ID NO: 877 - RNA, 19 nt, Artificial Sequence
  Description of Artificial Sequence: Synthetic oligonucleotide
ucaaccggcccugggaagc

SEQ ID NO: 878 - RNA, 19 nt, Artificial Sequence
  Description of Artificial Sequence: Synthetic oligonucleotide
caaccggcccugggaagcc

SEQ ID NO: 879 - RNA, 19 nt, Artificial Sequence
  Description of Artificial Sequence: Synthetic oligonucleotide
aaccggcccugggaagccu

SEQ ID NO: 880 - RNA, 19 nt, Artificial Sequence
  Description of Artificial Sequence: Synthetic oligonucleotide
accggcccugggaagccua

SEQ ID NO: 881 - RNA, 19 nt, Artificial Sequence
  Description of Artificial Sequence: Synthetic oligonucleotide
ccggcccugggaagccuac

SEQ ID NO: 882 - RNA, 19 nt, Artificial Sequence
  Description of Artificial Sequence: Synthetic oligonucleotide
cggcccugggaagccuaca

SEQ ID NO: 883 - RNA, 19 nt, Artificial Sequence
  Description of Artificial Sequence: Synthetic oligonucleotide
ggcccugggaagccuacaa

SEQ ID NO: 884 - RNA, 19 nt, Artificial Sequence
  Description of Artificial Sequence: Synthetic oligonucleotide
gcccugggaagccuacaag

SEQ ID NO: 885 - RNA, 19 nt, Artificial Sequence
  Description of Artificial Sequence: Synthetic oligonucleotide
cccugggaagccuacaagg

SEQ ID NO: 886 - RNA, 19 nt, Artificial Sequence
  Description of Artificial Sequence: Synthetic oligonucleotide
ccugggaagccuacaaggc

SEQ ID NO: 887 - RNA, 19 nt, Artificial Sequence
  Description of Artificial Sequence: Synthetic oligonucleotide
cugggaagccuacaaggcg

SEQ ID NO: 888 - RNA, 19 nt, Artificial Sequence
  Description of Artificial Sequence: Synthetic oligonucleotide
ugggaagccuacaaggcgg

SEQ ID NO: 889 - RNA, 19 nt, Artificial Sequence
  Description of Artificial Sequence: Synthetic oligonucleotide
gggaagccuacaaggcggg

SEQ ID NO: 890 - RNA, 19 nt, Artificial Sequence
  Description of Artificial Sequence: Synthetic oligonucleotide
ggaagccuacaaggcgggg

SEQ ID NO: 891 - RNA, 19 nt, Artificial Sequence
  Description of Artificial Sequence: Synthetic oligonucleotide
gaagccuacaaggcggggu

SEQ ID NO: 892 - RNA, 19 nt, Artificial Sequence
  Description of Artificial Sequence: Synthetic oligonucleotide
aagccuacaaggcgggguu

SEQ ID NO: 893 - RNA, 19 nt, Artificial Sequence
  Description of Artificial Sequence: Synthetic oligonucleotide
agccuacaaggcgggguuu

SEQ ID NO: 894 - RNA, 19 nt, Artificial Sequence
  Description of Artificial Sequence: Synthetic oligonucleotide
gccuacaaggcgggguuug

SEQ ID NO: 895 - RNA, 19 nt, Artificial Sequence
  Description of Artificial Sequence: Synthetic oligonucleotide
ccuacaaggcgggguuugg

SEQ ID NO: 896 - RNA, 19 nt, Artificial Sequence
  Description of Artificial Sequence: Synthetic oligonucleotide
cuacaaggcgggguuuggg

SEQ ID NO: 897 - RNA, 19 nt, Artificial Sequence
  Description of Artificial Sequence: Synthetic oligonucleotide
uacaaggcgggguuugggg

SEQ ID NO: 898 - RNA, 19 nt, Artificial Sequence
  Description of Artificial Sequence: Synthetic oligonucleotide
acaaggcgggguuugggga

SEQ ID NO: 899 - RNA, 19 nt, Artificial Sequence
  Description of Artificial Sequence: Synthetic oligonucleotide
caaggcgggguuuggggau

SEQ ID NO: 900 - RNA, 19 nt, Artificial Sequence
  Description of Artificial Sequence: Synthetic oligonucleotide
aaggcgggguuuggggauc

SEQ ID NO: 901 - RNA, 19 nt, Artificial Sequence
  Description of Artificial Sequence: Synthetic oligonucleotide
aggcgggguuuggggaucc

SEQ ID NO: 902 - RNA, 19 nt, Artificial Sequence
  Description of Artificial Sequence: Synthetic oligonucleotide
ggcgggguuuggggauccc

SEQ ID NO: 903 - RNA, 19 nt, Artificial Sequence
  Description of Artificial Sequence: Synthetic oligonucleotide
gcgggguuuggggaucccc

SEQ ID NO: 904 - RNA, 19 nt, Artificial Sequence
  Description of Artificial Sequence: Synthetic oligonucleotide
cgggguuuggggaucccca

SEQ ID NO: 905 - RNA, 19 nt, Artificial Sequence
  Description of Artificial Sequence: Synthetic oligonucleotide
gggguuuggggauccccac

SEQ ID NO: 906 - RNA, 19 nt, Artificial Sequence
  Description of Artificial Sequence: Synthetic oligonucleotide
ggguuuggggauccccacg

SEQ ID NO: 907 - RNA, 19 nt, Artificial Sequence
  Description of Artificial Sequence: Synthetic oligonucleotide
gguuuggggauccccacgg

SEQ ID NO: 908 - RNA, 19 nt, Artificial Sequence
  Description of Artificial Sequence: Synthetic oligonucleotide
guuuggggauccccacggc

SEQ ID NO: 909 - RNA, 19 nt, Artificial Sequence
  Description of Artificial Sequence: Synthetic oligonucleotide
uuuggggauccccacggcg

SEQ ID NO: 910 - RNA, 19 nt, Artificial Sequence
  Description of Artificial Sequence: Synthetic oligonucleotide
uuggggauccccacggcga

SEQ ID NO: 911 - RNA, 19 nt, Artificial Sequence
  Description of Artificial Sequence: Synthetic oligonucleotide
uggggauccccacggcgag

SEQ ID NO: 912 - RNA, 19 nt, Artificial Sequence
  Description of Artificial Sequence: Synthetic oligonucleotide
ggggauccccacggcgagu

SEQ ID NO: 913 - RNA, 19 nt, Artificial Sequence
  Description of Artificial Sequence: Synthetic oligonucleotide
gggauccccacggcgaguu

SEQ ID NO: 914 - RNA, 19 nt, Artificial Sequence
  Description of Artificial Sequence: Synthetic oligonucleotide
ggauccccacggcgaguuc

SEQ ID NO: 915 - RNA, 19 nt, Artificial Sequence
  Description of Artificial Sequence: Synthetic oligonucleotide
gauccccacggcgaguucu

SEQ ID NO: 916 - RNA, 19 nt, Artificial Sequence
  Description of Artificial Sequence: Synthetic oligonucleotide
auccccacggcgaguucug

SEQ ID NO: 917 - RNA, 19 nt, Artificial Sequence
  Description of Artificial Sequence: Synthetic oligonucleotide
uccccacggcgaguucugg

SEQ ID NO: 918 - RNA, 19 nt, Artificial Sequence
  Description of Artificial Sequence: Synthetic oligonucleotide
ccccacggcgaguucuggc

SEQ ID NO: 919 - RNA, 19 nt, Artificial Sequence
  Description of Artificial Sequence: Synthetic oligonucleotide
cccacggcgaguucuggcu

SEQ ID NO: 920 - RNA, 19 nt, Artificial Sequence
  Description of Artificial Sequence: Synthetic oligonucleotide
ccacggcgaguucuggcug

SEQ ID NO: 921 - RNA, 19 nt, Artificial Sequence
  Description of Artificial Sequence: Synthetic oligonucleotide
cacggcgaguucuggcugg

SEQ ID NO: 922 - RNA, 19 nt, Artificial Sequence
  Description of Artificial Sequence: Synthetic oligonucleotide
acggcgaguucuggcuggg

SEQ ID NO: 923 - RNA, 19 nt, Artificial Sequence
  Description of Artificial Sequence: Synthetic oligonucleotide
cggcgaguucuggcugggu

SEQ ID NO: 924 - RNA, 19 nt, Artificial Sequence
  Description of Artificial Sequence: Synthetic oligonucleotide
ggcgaguucuggcuggguc

SEQ ID NO: 925 - RNA, 19 nt, Artificial Sequence
  Description of Artificial Sequence: Synthetic oligonucleotide
gcgaguucuggcugggucu

SEQ ID NO: 926 - RNA, 19 nt, Artificial Sequence
  Description of Artificial Sequence: Synthetic oligonucleotide
cgaguucuggcugggucug

SEQ ID NO: 927 - RNA, 19 nt, Artificial Sequence
  Description of Artificial Sequence: Synthetic oligonucleotide
gaguucuggcugggucugg

SEQ ID NO: 928 - RNA, 19 nt, Artificial Sequence
  Description of Artificial Sequence: Synthetic oligonucleotide
aguucuggcugggucugga

SEQ ID NO: 929 - RNA, 19 nt, Artificial Sequence
  Description of Artificial Sequence: Synthetic oligonucleotide
guucuggcugggucuggag

SEQ ID NO: 930 - RNA, 19 nt, Artificial Sequence
  Description of Artificial Sequence: Synthetic oligonucleotide
uucuggcugggucuggaga

SEQ ID NO: 931 - RNA, 19 nt, Artificial Sequence
  Description of Artificial Sequence: Synthetic oligonucleotide
ucuggcugggucuggagaa

SEQ ID NO: 932 - RNA, 19 nt, Artificial Sequence
  Description of Artificial Sequence: Synthetic oligonucleotide
cuggcugggucuggagaag

SEQ ID NO: 933 - RNA, 19 nt, Artificial Sequence
  Description of Artificial Sequence: Synthetic oligonucleotide
uggcugggucuggagaagg

SEQ ID NO: 934 - RNA, 19 nt, Artificial Sequence
  Description of Artificial Sequence: Synthetic oligonucleotide
ggcugggucuggagaaggu

SEQ ID NO: 935 - RNA, 19 nt, Artificial Sequence
  Description of Artificial Sequence: Synthetic oligonucleotide
gcugggucuggagaaggug

SEQ ID NO: 936 - RNA, 19 nt, Artificial Sequence
  Description of Artificial Sequence: Synthetic oligonucleotide
cugggucuggagaaggugc

SEQ ID NO: 937 - RNA, 19 nt, Artificial Sequence
  Description of Artificial Sequence: Synthetic oligonucleotide
ugggucuggagaaggugca

SEQ ID NO: 938 - RNA, 19 nt, Artificial Sequence
  Description of Artificial Sequence: Synthetic oligonucleotide
gggucuggagaaggugcau

SEQ ID NO: 939 - RNA, 19 nt, Artificial Sequence
  Description of Artificial Sequence: Synthetic oligonucleotide
ggucuggagaaggugcaua

SEQ ID NO: 940 - RNA, 19 nt, Artificial Sequence
  Description of Artificial Sequence: Synthetic oligonucleotide
gucuggagaaggugcauag

SEQ ID NO: 941 - RNA, 19 nt, Artificial Sequence
  Description of Artificial Sequence: Synthetic oligonucleotide
ucuggagaaggugcauagc

SEQ ID NO: 942 - RNA, 19 nt, Artificial Sequence
  Description of Artificial Sequence: Synthetic oligonucleotide
cuggagaaggugcauagca

SEQ ID NO: 943 - RNA, 19 nt, Artificial Sequence
  Description of Artificial Sequence: Synthetic oligonucleotide
uggagaaggugcauagcau

SEQ ID NO: 944 - RNA, 19 nt, Artificial Sequence
  Description of Artificial Sequence: Synthetic oligonucleotide
ggagaaggugcauagcauc

SEQ ID NO: 945 - RNA, 19 nt, Artificial Sequence
  Description of Artificial Sequence: Synthetic oligonucleotide
gagaaggugcauagcauca

SEQ ID NO: 946 - RNA, 19 nt, Artificial Sequence
  Description of Artificial Sequence: Synthetic oligonucleotide
agaaggugcauagcaucac

SEQ ID NO: 947 - RNA, 19 nt, Artificial Sequence
  Description of Artificial Sequence: Synthetic oligonucleotide
gaaggugcauagcaucacg

SEQ ID NO: 948 - RNA, 19 nt, Artificial Sequence
  Description of Artificial Sequence: Synthetic oligonucleotide
aaggugcauagcaucacgg

SEQ ID NO: 949 - RNA, 19 nt, Artificial Sequence
  Description of Artificial Sequence: Synthetic oligonucleotide
aggugcauagcaucacggg

SEQ ID NO: 950 - RNA, 19 nt, Artificial Sequence
  Description of Artificial Sequence: Synthetic oligonucleotide
ggugcauagcaucacgggg

SEQ ID NO: 951 - RNA, 19 nt, Artificial Sequence
  Description of Artificial Sequence: Synthetic oligonucleotide
gugcauagcaucacggggg

SEQ ID NO: 952 - RNA, 19 nt, Artificial Sequence
  Description of Artificial Sequence: Synthetic oligonucleotide
ugcauagcaucacggggga

SEQ ID NO: 953 - RNA, 19 nt, Artificial Sequence
  Description of Artificial Sequence: Synthetic oligonucleotide
gcauagcaucacgggggac

SEQ ID NO: 954 - RNA, 19 nt, Artificial Sequence
  Description of Artificial Sequence: Synthetic oligonucleotide
cauagcaucacgggggacc

SEQ ID NO: 955 - RNA, 19 nt, Artificial Sequence
  Description of Artificial Sequence: Synthetic oligonucleotide
auagcaucacgggggaccg

SEQ ID NO: 956 - RNA, 19 nt, Artificial Sequence
  Description of Artificial Sequence: Synthetic oligonucleotide
uagcaucacgggggaccgc

SEQ ID NO: 957 - RNA, 19 nt, Artificial Sequence
  Description of Artificial Sequence: Synthetic oligonucleotide
agcaucacgggggaccgca

SEQ ID NO: 958 - RNA, 19 nt, Artificial Sequence
  Description of Artificial Sequence: Synthetic oligonucleotide
gcaucacgggggaccgcaa

SEQ ID NO: 959 - RNA, 19 nt, Artificial Sequence
  Description of Artificial Sequence: Synthetic oligonucleotide
caucacgggggaccgcaac

SEQ ID NO: 960 - RNA, 19 nt, Artificial Sequence
  Description of Artificial Sequence: Synthetic oligonucleotide
aucacgggggaccgcaaca

SEQ ID NO: 961 - RNA, 19 nt, Artificial Sequence
  Description of Artificial Sequence: Synthetic oligonucleotide
ucacgggggaccgcaacag

SEQ ID NO: 962 - RNA, 19 nt, Artificial Sequence
  Description of Artificial Sequence: Synthetic oligonucleotide
cacgggggaccgcaacagc

SEQ ID NO: 963 - RNA, 19 nt, Artificial Sequence
  Description of Artificial Sequence: Synthetic oligonucleotide
acgggggaccgcaacagcc

SEQ ID NO: 964 - RNA, 19 nt, Artificial Sequence
  Description of Artificial Sequence: Synthetic oligonucleotide
cgggggaccgcaacagccg

SEQ ID NO: 965 - RNA, 19 nt, Artificial Sequence
  Description of Artificial Sequence: Synthetic oligonucleotide
gggggaccgcaacagccgc

SEQ ID NO: 966 - RNA, 19 nt, Artificial Sequence
  Description of Artificial Sequence: Synthetic oligonucleotide
ggggaccgcaacagccgcc

SEQ ID NO: 967 - RNA, 19 nt, Artificial Sequence
  Description of Artificial Sequence: Synthetic oligonucleotide
gggaccgcaacagccgccu

SEQ ID NO: 968 - RNA, 19 nt, Artificial Sequence
  Description of Artificial Sequence: Synthetic oligonucleotide
ggaccgcaacagccgccug

SEQ ID NO: 969 - RNA, 19 nt, Artificial Sequence
  Description of Artificial Sequence: Synthetic oligonucleotide
gaccgcaacagccgccugg

SEQ ID NO: 970 - RNA, 19 nt, Artificial Sequence
  Description of Artificial Sequence: Synthetic oligonucleotide
accgcaacagccgccuggc

SEQ ID NO: 971 - RNA, 19 nt, Artificial Sequence
  Description of Artificial Sequence: Synthetic oligonucleotide
ccgcaacagccgccuggcc

SEQ ID NO: 972 - RNA, 19 nt, Artificial Sequence
  Description of Artificial Sequence: Synthetic oligonucleotide
cgcaacagccgccuggccg

SEQ ID NO: 973 - RNA, 19 nt, Artificial Sequence
  Description of Artificial Sequence: Synthetic oligonucleotide
gcaacagccgccuggccgu

SEQ ID NO: 974 - RNA, 19 nt, Artificial Sequence
  Description of Artificial Sequence: Synthetic oligonucleotide
caacagccgccuggccgug

SEQ ID NO: 975 - RNA, 19 nt, Artificial Sequence
  Description of Artificial Sequence: Synthetic oligonucleotide
aacagccgccuggccgugc

SEQ ID NO: 976 - RNA, 19 nt, Artificial Sequence
  Description of Artificial Sequence: Synthetic oligonucleotide
acagccgccuggccgugca

SEQ ID NO: 977 - RNA, 19 nt, Artificial Sequence
  Description of Artificial Sequence: Synthetic oligonucleotide
cagccgccuggccgugcag

SEQ ID NO: 978 - RNA, 19 nt, Artificial Sequence
  Description of Artificial Sequence: Synthetic oligonucleotide
agccgccuggccgugcagc

SEQ ID NO: 979 - RNA, 19 nt, Artificial Sequence
  Description of Artificial Sequence: Synthetic oligonucleotide
gccgccuggccgugcagcu

SEQ ID NO: 980 - RNA, 19 nt, Artificial Sequence
  Description of Artificial Sequence: Synthetic oligonucleotide
ccgccuggccgugcagcug

SEQ ID NO: 981 - RNA, 19 nt, Artificial Sequence
  Description of Artificial Sequence: Synthetic oligonucleotide
cgccuggccgugcagcugc

SEQ ID NO: 982 - RNA, 19 nt, Artificial Sequence
  Description of Artificial Sequence: Synthetic oligonucleotide
gccuggccgugcagcugcg

SEQ ID NO: 983 - RNA, 19 nt, Artificial Sequence
  Description of Artificial Sequence: Synthetic oligonucleotide
ccuggccgugcagcugcgg

SEQ ID NO: 984 - RNA, 19 nt, Artificial Sequence
  Description of Artificial Sequence: Synthetic oligonucleotide
cuggccgugcagcugcggg

SEQ ID NO: 985 - RNA, 19 nt, Artificial Sequence
  Description of Artificial Sequence: Synthetic oligonucleotide
uggccgugcagcugcggga

SEQ ID NO: 986 - RNA, 19 nt, Artificial Sequence
  Description of Artificial Sequence: Synthetic oligonucleotide
ggccgugcagcugcgggac

SEQ ID NO: 987 - RNA, 19 nt, Artificial Sequence
  Description of Artificial Sequence: Synthetic oligonucleotide
gccgugcagcugcgggacu

SEQ ID NO: 988 - RNA, 19 nt, Artificial Sequence
  Description of Artificial Sequence: Synthetic oligonucleotide
ccgugcagcugcgggacug

SEQ ID NO: 989 - RNA, 19 nt, Artificial Sequence
  Description of Artificial Sequence: Synthetic oligonucleotide
cgugcagcugcgggacugg

SEQ ID NO: 990 - RNA, 19 nt, Artificial Sequence
  Description of Artificial Sequence: Synthetic oligonucleotide
gugcagcugcgggacuggg

SEQ ID NO: 991 - RNA, 19 nt, Artificial Sequence
  Description of Artificial Sequence: Synthetic oligonucleotide
ugcagcugcgggacuggga

SEQ ID NO: 992 - RNA, 19 nt, Artificial Sequence
  Description of Artificial Sequence: Synthetic oligonucleotide
gcagcugcgggacugggau

SEQ ID NO: 993 - RNA, 19 nt, Artificial Sequence
  Description of Artificial Sequence: Synthetic oligonucleotide
cagcugcgggacugggaug

SEQ ID NO: 994 - RNA, 19 nt, Artificial Sequence
  Description of Artificial Sequence: Synthetic oligonucleotide
agcugcgggacugggaugg

SEQ ID NO: 995 - RNA, 19 nt, Artificial Sequence
  Description of Artificial Sequence: Synthetic oligonucleotide
gcugcgggacugggauggc

SEQ ID NO: 996 - RNA, 19 nt, Artificial Sequence
  Description of Artificial Sequence: Synthetic oligonucleotide
cugcgggacugggauggca

SEQ ID NO: 997 - RNA, 19 nt, Artificial Sequence
  Description of Artificial Sequence: Synthetic oligonucleotide
ugcgggacugggauggcaa

SEQ ID NO: 998 - RNA, 19 nt, Artificial Sequence
  Description of Artificial Sequence: Synthetic oligonucleotide
gcgggacugggauggcaac

SEQ ID NO: 999 - RNA, 19 nt, Artificial Sequence
  Description of Artificial Sequence: Synthetic oligonucleotide
cgggacugggauggcaacg

SEQ ID NO: 1000 - RNA, 19 nt, Artificial Sequence
  Description of Artificial Sequence: Synthetic oligonucleotide
gggacugggauggcaacgc

SEQ ID NO: 1001 - RNA, 19 nt, Artificial Sequence
  Description of Artificial Sequence: Synthetic oligonucleotide
ggacugggauggcaacgcc

SEQ ID NO: 1002 - RNA, 19 nt, Artificial Sequence
  Description of Artificial Sequence: Synthetic oligonucleotide
gacugggauggcaacgccg

SEQ ID NO: 1003 - RNA, 19 nt, Artificial Sequence
  Description of Artificial Sequence: Synthetic oligonucleotide
acugggauggcaacgccga

SEQ ID NO: 1004 - RNA, 19 nt, Artificial Sequence
  Description of Artificial Sequence: Synthetic oligonucleotide
cugggauggcaacgccgag

SEQ ID NO: 1005 - RNA, 19 nt, Artificial Sequence
  Description of Artificial Sequence: Synthetic oligonucleotide
ugggauggcaacgccgagu

SEQ ID NO: 1006 - RNA, 19 nt, Artificial Sequence
  Description of Artificial Sequence: Synthetic oligonucleotide
gggauggcaacgccgaguu

SEQ ID NO: 1007 - RNA, 19 nt, Artificial Sequence
  Description of Artificial Sequence: Synthetic oligonucleotide
ggauggcaacgccgaguug

SEQ ID NO: 1008 - RNA, 19 nt, Artificial Sequence
  Description of Artificial Sequence: Synthetic oligonucleotide
gauggcaacgccgaguugc

SEQ ID NO: 1009 - RNA, 19 nt, Artificial Sequence
  Description of Artificial Sequence: Synthetic oligonucleotide
auggcaacgccgaguugcu

SEQ ID NO: 1010 - RNA, 19 nt, Artificial Sequence
  Description of Artificial Sequence: Synthetic oligonucleotide
uggcaacgccgaguugcug

SEQ ID NO: 1011 - RNA, 19 nt, Artificial Sequence
  Description of Artificial Sequence: Synthetic oligonucleotide
ggcaacgccgaguugcugc

SEQ ID NO: 1012 - RNA, 19 nt, Artificial Sequence
  Description of Artificial Sequence: Synthetic oligonucleotide
gcaacgccgaguugcugca

SEQ ID NO: 1013 - RNA, 19 nt, Artificial Sequence
  Description of Artificial Sequence: Synthetic oligonucleotide
caacgccgaguugcugcag

SEQ ID NO: 1014 - RNA, 19 nt, Artificial Sequence
  Description of Artificial Sequence: Synthetic oligonucleotide
aacgccgaguugcugcagu

SEQ ID NO: 1015 - RNA, 19 nt, Artificial Sequence
  Description of Artificial Sequence: Synthetic oligonucleotide
acgccgaguugcugcaguu

SEQ ID NO: 1016 - RNA, 19 nt, Artificial Sequence
  Description of Artificial Sequence: Synthetic oligonucleotide
cgccgaguugcugcaguuc

SEQ ID NO: 1017 - RNA, 19 nt, Artificial Sequence
  Description of Artificial Sequence: Synthetic oligonucleotide
gccgaguugcugcaguucu

SEQ ID NO: 1018 - RNA, 19 nt, Artificial Sequence
  Description of Artificial Sequence: Synthetic oligonucleotide
ccgaguugcugcaguucuc

SEQ ID NO: 1019 - RNA, 19 nt, Artificial Sequence
  Description of Artificial Sequence: Synthetic oligonucleotide
cgaguugcugcaguucucc

SEQ ID NO: 1020 - RNA, 19 nt, Artificial Sequence
  Description of Artificial Sequence: Synthetic oligonucleotide
gaguugcugcaguucuccg

SEQ ID NO: 1021 - RNA, 19 nt, Artificial Sequence
  Description of Artificial Sequence: Synthetic oligonucleotide
aguugcugcaguucuccgu

SEQ ID NO: 1022 - RNA, 19 nt, Artificial Sequence
  Description of Artificial Sequence: Synthetic oligonucleotide
guugcugcaguucuccgug

SEQ ID NO: 1023 - RNA, 19 nt, Artificial Sequence
  Description of Artificial Sequence: Synthetic oligonucleotide
uugcugcaguucuccgugc

SEQ ID NO: 1024 - RNA, 19 nt, Artificial Sequence
  Description of Artificial Sequence: Synthetic oligonucleotide
ugcugcaguucuccgugca

SEQ ID NO: 1025 - RNA, 19 nt, Artificial Sequence
  Description of Artificial Sequence: Synthetic oligonucleotide
gcugcaguucuccgugcac

SEQ ID NO: 1026 - RNA, 19 nt, Artificial Sequence
  Description of Artificial Sequence: Synthetic oligonucleotide
cugcaguucuccgugcacc

SEQ ID NO: 1027 - RNA, 19 nt, Artificial Sequence
  Description of Artificial Sequence: Synthetic oligonucleotide
ugcaguucuccgugcaccu

SEQ ID NO: 1028 - RNA, 19 nt, Artificial Sequence
  Description of Artificial Sequence: Synthetic oligonucleotide
gcaguucuccgugcaccug

SEQ ID NO: 1029 - RNA, 19 nt, Artificial Sequence
  Description of Artificial Sequence: Synthetic oligonucleotide
caguucuccgugcaccugg

SEQ ID NO: 1030 - RNA, 19 nt, Artificial Sequence
  Description of Artificial Sequence: Synthetic oligonucleotide
aguucuccgugcaccuggg

SEQ ID NO: 1031 - RNA, 19 nt, Artificial Sequence
  Description of Artificial Sequence: Synthetic oligonucleotide
guucuccgugcaccugggu

SEQ ID NO: 1032 - RNA, 19 nt, Artificial Sequence
  Description of Artificial Sequence: Synthetic oligonucleotide
uucuccgugcaccugggug

SEQ ID NO: 1033 - RNA, 19 nt, Artificial Sequence
  Description of Artificial Sequence: Synthetic oligonucleotide
ucuccgugcaccugggugg

SEQ ID NO: 1034 - RNA, 19 nt, Artificial Sequence
  Description of Artificial Sequence: Synthetic oligonucleotide
cuccgugcaccuggguggc

SEQ ID NO: 1035 - RNA, 19 nt, Artificial Sequence
  Description of Artificial Sequence: Synthetic oligonucleotide
uccgugcaccuggguggcg

SEQ ID NO: 1036 - RNA, 19 nt, Artificial Sequence
  Description of Artificial Sequence: Synthetic oligonucleotide
ccgugcaccuggguggcga

SEQ ID NO: 1037 - RNA, 19 nt, Artificial Sequence
  Description of Artificial Sequence: Synthetic oligonucleotide
cgugcaccuggguggcgag

SEQ ID NO: 1038 - RNA, 19 nt, Artificial Sequence
  Description of Artificial Sequence: Synthetic oligonucleotide
gugcaccuggguggcgagg

SEQ ID NO: 1039 - RNA, 19 nt, Artificial Sequence
  Description of Artificial Sequence: Synthetic oligonucleotide
ugcaccuggguggcgagga

SEQ ID NO: 1040 - RNA, 19 nt, Artificial Sequence
  Description of Artificial Sequence: Synthetic oligonucleotide
gcaccuggguggcgaggac

SEQ ID NO: 1041 - RNA, 19 nt, Artificial Sequence
  Description of Artificial Sequence: Synthetic oligonucleotide
caccuggguggcgaggaca

SEQ ID NO: 1042 - RNA, 19 nt, Artificial Sequence
  Description of Artificial Sequence: Synthetic oligonucleotide
accuggguggcgaggacac

SEQ ID NO: 1043 - RNA, 19 nt, Artificial Sequence
  Description of Artificial Sequence: Synthetic oligonucleotide
ccuggguggcgaggacacg

SEQ ID NO: 1044 - RNA, 19 nt, Artificial Sequence
  Description of Artificial Sequence: Synthetic oligonucleotide
cuggguggcgaggacacgg

SEQ ID NO: 1045 - RNA, 19 nt, Artificial Sequence
  Description of Artificial Sequence: Synthetic oligonucleotide
uggguggcgaggacacggc

SEQ ID NO: 1046 - RNA, 19 nt, Artificial Sequence
  Description of Artificial Sequence: Synthetic oligonucleotide
ggguggcgaggacacggcc

SEQ ID NO: 1047 - RNA, 19 nt, Artificial Sequence
  Description of Artificial Sequence: Synthetic oligonucleotide
gguggcgaggacacggccu

SEQ ID NO: 1048 - RNA, 19 nt, Artificial Sequence
  Description of Artificial Sequence: Synthetic oligonucleotide
guggcgaggacacggccua

SEQ ID NO: 1049 - RNA, 19 nt, Artificial Sequence
  Description of Artificial Sequence: Synthetic oligonucleotide
uggcgaggacacggccuau

SEQ ID NO: 1050 - RNA, 19 nt, Artificial Sequence
  Description of Artificial Sequence: Synthetic oligonucleotide
ggcgaggacacggccuaua

SEQ ID NO: 1051 - RNA, 19 nt, Artificial Sequence
  Description of Artificial Sequence: Synthetic oligonucleotide
gcgaggacacggccuauag

SEQ ID NO: 1052 - RNA, 19 nt, Artificial Sequence
  Description of Artificial Sequence: Synthetic oligonucleotide
cgaggacacggccuauagc

SEQ ID NO: 1053 - RNA, 19 nt, Artificial Sequence
  Description of Artificial Sequence: Synthetic oligonucleotide
gaggacacggccuauagcc

SEQ ID NO: 1054 - RNA, 19 nt, Artificial Sequence
  Description of Artificial Sequence: Synthetic oligonucleotide
aggacacggccuauagccu

SEQ ID NO: 1055 - RNA, 19 nt, Artificial Sequence
  Description of Artificial Sequence: Synthetic oligonucleotide
ggacacggccuauagccug

SEQ ID NO: 1056 - RNA, 19 nt, Artificial Sequence
  Description of Artificial Sequence: Synthetic oligonucleotide
gacacggccuauagccugc

SEQ ID NO: 1057 - RNA, 19 nt, Artificial Sequence
  Description of Artificial Sequence: Synthetic oligonucleotide
acacggccuauagccugca

SEQ ID NO: 1058 - RNA, 19 nt, Artificial Sequence
  Description of Artificial Sequence: Synthetic oligonucleotide
cacggccuauagccugcag

SEQ ID NO: 1059 - RNA, 19 nt, Artificial Sequence
  Description of Artificial Sequence: Synthetic oligonucleotide
acggccuauagccugcagc

SEQ ID NO: 1060 - RNA, 19 nt, Artificial Sequence
  Description of Artificial Sequence: Synthetic oligonucleotide
cggccuauagccugcagcu

SEQ ID NO: 1061 - RNA, 19 nt, Artificial Sequence
  Description of Artificial Sequence: Synthetic oligonucleotide
ggccuauagccugcagcuc

SEQ ID NO: 1062 - RNA, 19 nt, Artificial Sequence
  Description of Artificial Sequence: Synthetic oligonucleotide
gccuauagccugcagcuca

SEQ ID NO: 1063 - RNA, 19 nt, Artificial Sequence
  Description of Artificial Sequence: Synthetic oligonucleotide
ccuauagccugcagcucac

SEQ ID NO: 1064 - RNA, 19 nt, Artificial Sequence
  Description of Artificial Sequence: Synthetic oligonucleotide
cuauagccugcagcucacu

SEQ ID NO: 1065 - RNA, 19 nt, Artificial Sequence
  Description of Artificial Sequence: Synthetic oligonucleotide
uauagccugcagcucacug

SEQ ID NO: 1066 - RNA, 19 nt, Artificial Sequence
  Description of Artificial Sequence: Synthetic oligonucleotide
auagccugcagcucacugc

SEQ ID NO: 1067 - RNA, 19 nt, Artificial Sequence
  Description of Artificial Sequence: Synthetic oligonucleotide
uagccugcagcucacugca

SEQ ID NO: 1068 - RNA, 19 nt, Artificial Sequence
  Description of Artificial Sequence: Synthetic oligonucleotide
agccugcagcucacugcac

SEQ ID NO: 1069 - RNA, 19 nt, Artificial Sequence
  Description of Artificial Sequence: Synthetic oligonucleotide
gccugcagcucacugcacc

SEQ ID NO: 1070 - RNA, 19 nt, Artificial Sequence
  Description of Artificial Sequence: Synthetic oligonucleotide
ccugcagcucacugcaccc

SEQ ID NO: 1071 - RNA, 19 nt, Artificial Sequence
  Description of Artificial Sequence: Synthetic oligonucleotide
cugcagcucacugcacccg

SEQ ID NO: 1072 - RNA, 19 nt, Artificial Sequence
  Description of Artificial Sequence: Synthetic oligonucleotide
ugcagcucacugcacccgu

SEQ ID NO: 1073 - RNA, 19 nt, Artificial Sequence
  Description of Artificial Sequence: Synthetic oligonucleotide
gcagcucacugcacccgug

SEQ ID NO: 1074 - RNA, 19 nt, Artificial Sequence
  Description of Artificial Sequence: Synthetic oligonucleotide
cagcucacugcacccgugg

SEQ ID NO: 1075 - RNA, 19 nt, Artificial Sequence
  Description of Artificial Sequence: Synthetic oligonucleotide
agcucacugcacccguggc

SEQ ID NO: 1076 - RNA, 19 nt, Artificial Sequence
  Description of Artificial Sequence: Synthetic oligonucleotide
gcucacugcacccguggcc

SEQ ID NO: 1077 - RNA, 19 nt, Artificial Sequence
  Description of Artificial Sequence: Synthetic oligonucleotide
cucacugcacccguggccg

SEQ ID NO: 1078 - RNA, 19 nt, Artificial Sequence
  Description of Artificial Sequence: Synthetic oligonucleotide
ucacugcacccguggccgg

SEQ ID NO: 1079 - RNA, 19 nt, Artificial Sequence
  Description of Artificial Sequence: Synthetic oligonucleotide
cacugcacccguggccggc

SEQ ID NO: 1080 - RNA, 19 nt, Artificial Sequence
  Description of Artificial Sequence: Synthetic oligonucleotide
acugcacccguggccggcc

SEQ ID NO: 1081 - RNA, 19 nt, Artificial Sequence
  Description of Artificial Sequence: Synthetic oligonucleotide
cugcacccguggccggcca

SEQ ID NO: 1082 - RNA, 19 nt, Artificial Sequence
  Description of Artificial Sequence: Synthetic oligonucleotide
ugcacccguggccggccag

SEQ ID NO: 1083 - RNA, 19 nt, Artificial Sequence
  Description of Artificial Sequence: Synthetic oligonucleotide
gcacccguggccggccagc

SEQ ID NO: 1084 - RNA, 19 nt, Artificial Sequence
  Description of Artificial Sequence: Synthetic oligonucleotide
cacccguggccggccagcu

SEQ ID NO: 1085 - RNA, 19 nt, Artificial Sequence
  Description of Artificial Sequence: Synthetic oligonucleotide
acccguggccggccagcug

SEQ ID NO: 1086 - RNA, 19 nt, Artificial Sequence
  Description of Artificial Sequence: Synthetic oligonucleotide
cccguggccggccagcugg

SEQ ID NO: 1087 - RNA, 19 nt, Artificial Sequence
  Description of Artificial Sequence: Synthetic oligonucleotide
ccguggccggccagcuggg

SEQ ID NO: 1088 - RNA, 19 nt, Artificial Sequence
  Description of Artificial Sequence: Synthetic oligonucleotide
cguggccggccagcugggc

SEQ ID NO: 1089 - RNA, 19 nt, Artificial Sequence
  Description of Artificial Sequence: Synthetic oligonucleotide
guggccggccagcugggcg

SEQ ID NO: 1090 - RNA, 19 nt, Artificial Sequence
  Description of Artificial Sequence: Synthetic oligonucleotide
uggccggccagcugggcgc

SEQ ID NO: 1091 - RNA, 19 nt, Artificial Sequence
  Description of Artificial Sequence: Synthetic oligonucleotide
ggccggccagcugggcgcc

SEQ ID NO: 1092 - RNA, 19 nt, Artificial Sequence
  Description of Artificial Sequence: Synthetic oligonucleotide
gccggccagcugggcgcca

SEQ ID NO: 1093 - RNA, 19 nt, Artificial Sequence
  Description of Artificial Sequence: Synthetic oligonucleotide
ccggccagcugggcgccac

SEQ ID NO: 1094 - RNA, 19 nt, Artificial Sequence
  Description of Artificial Sequence: Synthetic oligonucleotide
cggccagcugggcgccacc

SEQ ID NO: 1095 - RNA, 19 nt, Artificial Sequence
  Description of Artificial Sequence: Synthetic oligonucleotide
ggccagcugggcgccacca

SEQ ID NO: 1096 - RNA, 19 nt, Artificial Sequence
  Description of Artificial Sequence: Synthetic oligonucleotide
gccagcugggcgccaccac

SEQ ID NO: 1097 - RNA, 19 nt, Artificial Sequence
  Description of Artificial Sequence: Synthetic oligonucleotide
ccagcugggcgccaccacc

SEQ ID NO: 1098 - RNA, 19 nt, Artificial Sequence
  Description of Artificial Sequence: Synthetic oligonucleotide
cagcugggcgccaccaccg

SEQ ID NO: 1099 - RNA, 19 nt, Artificial Sequence
  Description of Artificial Sequence: Synthetic oligonucleotide
agcugggcgccaccaccgu

SEQ ID NO: 1100 - RNA, 19 nt, Artificial Sequence
  Description of Artificial Sequence: Synthetic oligonucleotide
gcugggcgccaccaccguc

SEQ ID NO: 1101 - RNA, 19 nt, Artificial Sequence
  Description of Artificial Sequence: Synthetic oligonucleotide
cugggcgccaccaccgucc

SEQ ID NO: 1102 - RNA, 19 nt, Artificial Sequence
  Description of Artificial Sequence: Synthetic oligonucleotide
ugggcgccaccaccguccc

SEQ ID NO: 1103 - RNA, 19 nt, Artificial Sequence
  Description of Artificial Sequence: Synthetic oligonucleotide
gggcgccaccaccguccca

SEQ ID NO: 1104 - RNA, 19 nt, Artificial Sequence
  Description of Artificial Sequence: Synthetic oligonucleotide
ggcgccaccaccgucccac

SEQ ID NO: 1105 - RNA, 19 nt, Artificial Sequence
  Description of Artificial Sequence: Synthetic oligonucleotide
gcgccaccaccgucccacc

SEQ ID NO: 1106 - RNA, 19 nt, Artificial Sequence
  Description of Artificial Sequence: Synthetic oligonucleotide
cgccaccaccgucccaccc

SEQ ID NO: 1107 - RNA, 19 nt, Artificial Sequence
  Description of Artificial Sequence: Synthetic oligonucleotide
gccaccaccgucccaccca

SEQ ID NO: 1108 - RNA, 19 nt, Artificial Sequence
  Description of Artificial Sequence: Synthetic oligonucleotide
ccaccaccgucccacccag

SEQ ID NO: 1109 - RNA, 19 nt, Artificial Sequence
  Description of Artificial Sequence: Synthetic oligonucleotide
caccaccgucccacccagc

SEQ ID NO: 1110 - RNA, 19 nt, Artificial Sequence
  Description of Artificial Sequence: Synthetic oligonucleotide
accaccgucccacccagcg

SEQ ID NO: 1111 - RNA, 19 nt, Artificial Sequence
  Description of Artificial Sequence: Synthetic oligonucleotide
ccaccgucccacccagcgg

SEQ ID NO: 1112 - RNA, 19 nt, Artificial Sequence
  Description of Artificial Sequence: Synthetic oligonucleotide
caccgucccacccagcggc

SEQ ID NO: 1113 - RNA, 19 nt, Artificial Sequence
  Description of Artificial Sequence: Synthetic oligonucleotide
accgucccacccagcggcc

SEQ ID NO: 1114 - RNA, 19 nt, Artificial Sequence
  Description of Artificial Sequence: Synthetic oligonucleotide
ccgucccacccagcggccu

SEQ ID NO: 1115 - RNA, 19 nt, Artificial Sequence
  Description of Artificial Sequence: Synthetic oligonucleotide
cgucccacccagcggccuc

SEQ ID NO: 1116 - RNA, 19 nt, Artificial Sequence
  Description of Artificial Sequence: Synthetic oligonucleotide
gucccacccagcggccucu

SEQ ID NO: 1117 - RNA, 19 nt, Artificial Sequence
  Description of Artificial Sequence: Synthetic oligonucleotide
ucccacccagcggccucuc

SEQ ID NO: 1118 - RNA, 19 nt, Artificial Sequence
  Description of Artificial Sequence: Synthetic oligonucleotide
cccacccagcggccucucc

SEQ ID NO: 1119 - RNA, 19 nt, Artificial Sequence
  Description of Artificial Sequence: Synthetic oligonucleotide
ccacccagcggccucuccg

SEQ ID NO: 1120 - RNA, 19 nt, Artificial Sequence
  Description of Artificial Sequence: Synthetic oligonucleotide
cacccagcggccucuccgu

SEQ ID NO: 1121 - RNA, 19 nt, Artificial Sequence
  Description of Artificial Sequence: Synthetic oligonucleotide
acccagcggccucuccgua

SEQ ID NO: 1122 - RNA, 19 nt, Artificial Sequence
  Description of Artificial Sequence: Synthetic oligonucleotide
cccagcggccucuccguac

SEQ ID NO: 1123 - RNA, 19 nt, Artificial Sequence
  Description of Artificial Sequence: Synthetic oligonucleotide
ccagcggccucuccguacc

SEQ ID NO: 1124 - RNA, 19 nt, Artificial Sequence
  Description of Artificial Sequence: Synthetic oligonucleotide
cagcggccucuccguaccc

SEQ ID NO: 1125 - RNA, 19 nt, Artificial Sequence
  Description of Artificial Sequence: Synthetic oligonucleotide
agcggccucuccguacccu

SEQ ID NO: 1126 - RNA, 19 nt, Artificial Sequence
  Description of Artificial Sequence: Synthetic oligonucleotide
gcggccucuccguacccuu

SEQ ID NO: 1127 - RNA, 19 nt, Artificial Sequence
  Description of Artificial Sequence: Synthetic oligonucleotide
cggccucuccguacccuuc

SEQ ID NO: 1128 - RNA, 19 nt, Artificial Sequence
  Description of Artificial Sequence: Synthetic oligonucleotide
ggccucuccguacccuucu

SEQ ID NO: 1129 - RNA, 19 nt, Artificial Sequence
  Description of Artificial Sequence: Synthetic oligonucleotide
gccucuccguacccuucuc

SEQ ID NO: 1130 - RNA, 19 nt, Artificial Sequence
  Description of Artificial Sequence: Synthetic oligonucleotide
ccucuccguacccuucucc

SEQ ID NO: 1131 - RNA, 19 nt, Artificial Sequence
  Description of Artificial Sequence: Synthetic oligonucleotide
cucuccguacccuucucca

SEQ ID NO: 1132 - RNA, 19 nt, Artificial Sequence
  Description of Artificial Sequence: Synthetic oligonucleotide
ucuccguacccuucuccac

SEQ ID NO: 1133 - RNA, 19 nt, Artificial Sequence
  Description of Artificial Sequence: Synthetic oligonucleotide
cuccguacccuucuccacu

SEQ ID NO: 1134 - RNA, 19 nt, Artificial Sequence
  Description of Artificial Sequence: Synthetic oligonucleotide
uccguacccuucuccacuu

SEQ ID NO: 1135 - RNA, 19 nt, Artificial Sequence
  Description of Artificial Sequence: Synthetic oligonucleotide
ccguacccuucuccacuug

SEQ ID NO: 1136 - RNA, 19 nt, Artificial Sequence
  Description of Artificial Sequence: Synthetic oligonucleotide
cguacccuucuccacuugg

SEQ ID NO: 1137 - RNA, 19 nt, Artificial Sequence
  Description of Artificial Sequence: Synthetic oligonucleotide
guacccuucuccacuuggg

SEQ ID NO: 1138 - RNA, 19 nt, Artificial Sequence
  Description of Artificial Sequence: Synthetic oligonucleotide
uacccuucuccacuuggga

SEQ ID NO: 1139 - RNA, 19 nt, Artificial Sequence
  Description of Artificial Sequence: Synthetic oligonucleotide
acccuucuccacuugggac

SEQ ID NO: 1140 - RNA, 19 nt, Artificial Sequence
  Description of Artificial Sequence: Synthetic oligonucleotide
cccuucuccacuugggacc

SEQ ID NO: 1141 - RNA, 19 nt, Artificial Sequence
  Description of Artificial Sequence: Synthetic oligonucleotide
ccuucuccacuugggacca

SEQ ID NO: 1142 - RNA, 19 nt, Artificial Sequence
  Description of Artificial Sequence: Synthetic oligonucleotide
cuucuccacuugggaccag

SEQ ID NO: 1143 - RNA, 19 nt, Artificial Sequence
  Description of Artificial Sequence: Synthetic oligonucleotide
uucuccacuugggaccagg

SEQ ID NO: 1144 - RNA, 19 nt, Artificial Sequence
  Description of Artificial Sequence: Synthetic oligonucleotide
ucuccacuugggaccagga

SEQ ID NO: 1145 - RNA, 19 nt, Artificial Sequence
  Description of Artificial Sequence: Synthetic oligonucleotide
cuccacuugggaccaggau

SEQ ID NO: 1146 - RNA, 19 nt, Artificial Sequence
  Description of Artificial Sequence: Synthetic oligonucleotide
uccacuugggaccaggauc

SEQ ID NO: 1147 - RNA, 19 nt, Artificial Sequence
  Description of Artificial Sequence: Synthetic oligonucleotide
ccacuugggaccaggauca

SEQ ID NO: 1148 - RNA, 19 nt, Artificial Sequence
  Description of Artificial Sequence: Synthetic oligonucleotide
cacuugggaccaggaucac

SEQ ID NO: 1149 - RNA, 19 nt, Artificial Sequence
  Description of Artificial Sequence: Synthetic oligonucleotide
acuugggaccaggaucacg

SEQ ID NO: 1150 - RNA, 19 nt, Artificial Sequence
  Description of Artificial Sequence: Synthetic oligonucleotide
cuugggaccaggaucacga

SEQ ID NO: 1151 - RNA, 19 nt, Artificial Sequence
  Description of Artificial Sequence: Synthetic oligonucleotide
uugggaccaggaucacgac

SEQ ID NO: 1152 - RNA, 19 nt, Artificial Sequence
  Description of Artificial Sequence: Synthetic oligonucleotide
ugggaccaggaucacgacc

SEQ ID NO: 1153 - RNA, 19 nt, Artificial Sequence
  Description of Artificial Sequence: Synthetic oligonucleotide
gggaccaggaucacgaccu

SEQ ID NO: 1154 - RNA, 19 nt, Artificial Sequence
  Description of Artificial Sequence: Synthetic oligonucleotide
ggaccaggaucacgaccuc

SEQ ID NO: 1155 - RNA, 19 nt, Artificial Sequence
  Description of Artificial Sequence: Synthetic oligonucleotide
gaccaggaucacgaccucc

SEQ ID NO: 1156 - RNA, 19 nt, Artificial Sequence
  Description of Artificial Sequence: Synthetic oligonucleotide
accaggaucacgaccuccg

SEQ ID NO: 1157 - RNA, 19 nt, Artificial Sequence
  Description of Artificial Sequence: Synthetic oligonucleotide
ccaggaucacgaccuccgc

SEQ ID NO: 1158 - RNA, 19 nt, Artificial Sequence
  Description of Artificial Sequence: Synthetic oligonucleotide
caggaucacgaccuccgca

SEQ ID NO: 1159 - RNA, 19 nt, Artificial Sequence
  Description of Artificial Sequence: Synthetic oligonucleotide
aggaucacgaccuccgcag

SEQ ID NO: 1160 - RNA, 19 nt, Artificial Sequence
  Description of Artificial Sequence: Synthetic oligonucleotide
ggaucacgaccuccgcagg

SEQ ID NO: 1161 - RNA, 19 nt, Artificial Sequence
  Description of Artificial Sequence: Synthetic oligonucleotide
gaucacgaccuccgcaggg

SEQ ID NO: 1162 - RNA, 19 nt, Artificial Sequence
  Description of Artificial Sequence: Synthetic oligonucleotide
aucacgaccuccgcaggga

SEQ ID NO: 1163 - RNA, 19 nt, Artificial Sequence
  Description of Artificial Sequence: Synthetic oligonucleotide
ucacgaccuccgcagggac

SEQ ID NO: 1164 - RNA, 19 nt, Artificial Sequence
  Description of Artificial Sequence: Synthetic oligonucleotide
cacgaccuccgcagggaca

SEQ ID NO: 1165 - RNA, 19 nt, Artificial Sequence
  Description of Artificial Sequence: Synthetic oligonucleotide
acgaccuccgcagggacaa

SEQ ID NO: 1166 - RNA, 19 nt, Artificial Sequence
  Description of Artificial Sequence: Synthetic oligonucleotide
cgaccuccgcagggacaag

SEQ ID NO: 1167 - RNA, 19 nt, Artificial Sequence
  Description of Artificial Sequence: Synthetic oligonucleotide
gaccuccgcagggacaaga

SEQ ID NO: 1168 - RNA, 19 nt, Artificial Sequence
  Description of Artificial Sequence: Synthetic oligonucleotide
accuccgcagggacaagaa

SEQ ID NO: 1169 - RNA, 19 nt, Artificial Sequence
  Description of Artificial Sequence: Synthetic oligonucleotide
ccuccgcagggacaagaac

SEQ ID NO: 1170 - RNA, 19 nt, Artificial Sequence
  Description of Artificial Sequence: Synthetic oligonucleotide
cuccgcagggacaagaacu

SEQ ID NO: 1171 - RNA, 19 nt, Artificial Sequence
  Description of Artificial Sequence: Synthetic oligonucleotide
uccgcagggacaagaacug

SEQ ID NO: 1172 - RNA, 19 nt, Artificial Sequence
  Description of Artificial Sequence: Synthetic oligonucleotide
ccgcagggacaagaacugc

SEQ ID NO: 1173 - RNA, 19 nt, Artificial Sequence
  Description of Artificial Sequence: Synthetic oligonucleotide
cgcagggacaagaacugcg

SEQ ID NO: 1174 - RNA, 19 nt, Artificial Sequence
  Description of Artificial Sequence: Synthetic oligonucleotide
gcagggacaagaacugcgc

SEQ ID NO: 1175 - RNA, 19 nt, Artificial Sequence
  Description of Artificial Sequence: Synthetic oligonucleotide
cagggacaagaacugcgcc

SEQ ID NO: 1176 - RNA, 19 nt, Artificial Sequence
  Description of Artificial Sequence: Synthetic oligonucleotide
agggacaagaacugcgcca

SEQ ID NO: 1177 - RNA, 19 nt, Artificial Sequence
  Description of Artificial Sequence: Synthetic oligonucleotide
gggacaagaacugcgccaa

SEQ ID NO: 1178 - RNA, 19 nt, Artificial Sequence
  Description of Artificial Sequence: Synthetic oligonucleotide
ggacaagaacugcgccaag

SEQ ID NO: 1179 - RNA, 19 nt, Artificial Sequence
  Description of Artificial Sequence: Synthetic oligonucleotide
gacaagaacugcgccaaga

SEQ ID NO: 1180 - RNA, 19 nt, Artificial Sequence
  Description of Artificial Sequence: Synthetic oligonucleotide
acaagaacugcgccaagag

SEQ ID NO: 1181 - RNA, 19 nt, Artificial Sequence
  Description of Artificial Sequence: Synthetic oligonucleotide
caagaacugcgccaagagc

SEQ ID NO: 1182 - RNA, 19 nt, Artificial Sequence
  Description of Artificial Sequence: Synthetic oligonucleotide
aagaacugcgccaagagcc

SEQ ID NO: 1183 - RNA, 19 nt, Artificial Sequence
  Description of Artificial Sequence: Synthetic oligonucleotide
agaacugcgccaagagccu

SEQ ID NO: 1184 - RNA, 19 nt, Artificial Sequence
  Description of Artificial Sequence: Synthetic oligonucleotide
gaacugcgccaagagccuc

SEQ ID NO: 1185 - RNA, 19 nt, Artificial Sequence
  Description of Artificial Sequence: Synthetic oligonucleotide
aacugcgccaagagccucu

SEQ ID NO: 1186 - RNA, 19 nt, Artificial Sequence
  Description of Artificial Sequence: Synthetic oligonucleotide
acugcgccaagagccucuc

SEQ ID NO: 1187 - RNA, 19 nt, Artificial Sequence
  Description of Artificial Sequence: Synthetic oligonucleotide
cugcgccaagagccucucu

SEQ ID NO: 1188 - RNA, 19 nt, Artificial Sequence
  Description of Artificial Sequence: Synthetic oligonucleotide
ugcgccaagagccucucug

SEQ ID NO: 1189 - RNA, 19 nt, Artificial Sequence
  Description of Artificial Sequence: Synthetic oligonucleotide
gcgccaagagccucucugg

SEQ ID NO: 1190 - RNA, 19 nt, Artificial Sequence
  Description of Artificial Sequence: Synthetic oligonucleotide
cgccaagagccucucugga

SEQ ID NO: 1191 - RNA, 19 nt, Artificial Sequence
  Description of Artificial Sequence: Synthetic oligonucleotide
gccaagagccucucuggag

SEQ ID NO: 1192 - RNA, 19 nt, Artificial Sequence
  Description of Artificial Sequence: Synthetic oligonucleotide
ccaagagccucucuggagg

SEQ ID NO: 1193 - RNA, 19 nt, Artificial Sequence
  Description of Artificial Sequence: Synthetic oligonucleotide
caagagccucucuggaggc

SEQ ID NO: 1194 - RNA, 19 nt, Artificial Sequence
  Description of Artificial Sequence: Synthetic oligonucleotide
aagagccucucuggaggcu

SEQ ID NO: 1195 - RNA, 19 nt, Artificial Sequence
  Description of Artificial Sequence: Synthetic oligonucleotide
agagccucucuggaggcug

SEQ ID NO: 1196 - RNA, 19 nt, Artificial Sequence
  Description of Artificial Sequence: Synthetic oligonucleotide
gagccucucuggaggcugg

SEQ ID NO: 1197 - RNA, 19 nt, Artificial Sequence
  Description of Artificial Sequence: Synthetic oligonucleotide
agccucucuggaggcuggu

SEQ ID NO: 1198 - RNA, 19 nt, Artificial Sequence
  Description of Artificial Sequence: Synthetic oligonucleotide
gccucucuggaggcuggug

SEQ ID NO: 1199 - RNA, 19 nt, Artificial Sequence
  Description of Artificial Sequence: Synthetic oligonucleotide
ccucucuggaggcuggugg

SEQ ID NO: 1200 - RNA, 19 nt, Artificial Sequence
  Description of Artificial Sequence: Synthetic oligonucleotide
cucucuggaggcugguggu

SEQ ID NO: 1201 - RNA, 19 nt, Artificial Sequence
  Description of Artificial Sequence: Synthetic oligonucleotide
ucucuggaggcuggugguu

SEQ ID NO: 1202 - RNA, 19 nt, Artificial Sequence
  Description of Artificial Sequence: Synthetic oligonucleotide
cucuggaggcuggugguuu

SEQ ID NO: 1203 - RNA, 19 nt, Artificial Sequence
  Description of Artificial Sequence: Synthetic oligonucleotide
ucuggaggcuggugguuug

SEQ ID NO: 1204 - RNA, 19 nt, Artificial Sequence
  Description of Artificial Sequence: Synthetic oligonucleotide
cuggaggcuggugguuugg

SEQ ID NO: 1205 - RNA, 19 nt, Artificial Sequence
  Description of Artificial Sequence: Synthetic oligonucleotide
uggaggcuggugguuuggc

SEQ ID NO: 1206 - RNA, 19 nt, Artificial Sequence
  Description of Artificial Sequence: Synthetic oligonucleotide
ggaggcuggugguuuggca

SEQ ID NO: 1207 - RNA, 19 nt, Artificial Sequence
  Description of Artificial Sequence: Synthetic oligonucleotide
gaggcuggugguuuggcac

SEQ ID NO: 1208 - RNA, 19 nt, Artificial Sequence
  Description of Artificial Sequence: Synthetic oligonucleotide
aggcuggugguuuggcacc

SEQ ID NO: 1209 - RNA, 19 nt, Artificial Sequence
  Description of Artificial Sequence: Synthetic oligonucleotide
ggcuggugguuuggcaccu

SEQ ID NO: 1210 - RNA, 19 nt, Artificial Sequence
  Description of Artificial Sequence: Synthetic oligonucleotide
gcuggugguuuggcaccug

SEQ ID NO: 1211 - RNA, 19 nt, Artificial Sequence
  Description of Artificial Sequence: Synthetic oligonucleotide
cuggugguuuggcaccugc

SEQ ID NO: 1212 - RNA, 19 nt, Artificial Sequence
  Description of Artificial Sequence: Synthetic oligonucleotide
uggugguuuggcaccugca

SEQ ID NO: 1213 - RNA, 19 nt, Artificial Sequence
  Description of Artificial Sequence: Synthetic oligonucleotide
ggugguuuggcaccugcag

SEQ ID NO: 1214 - RNA, 19 nt, Artificial Sequence
  Description of Artificial Sequence: Synthetic oligonucleotide
gugguuuggcaccugcagc

SEQ ID NO: 1215 - RNA, 19 nt, Artificial Sequence
  Description of Artificial Sequence: Synthetic oligonucleotide
ugguuuggcaccugcagcc

SEQ ID NO: 1216 - RNA, 19 nt, Artificial Sequence
  Description of Artificial Sequence: Synthetic oligonucleotide
gguuuggcaccugcagcca

SEQ ID NO: 1217 - RNA, 19 nt, Artificial Sequence
  Description of Artificial Sequence: Synthetic oligonucleotide
guuuggcaccugcagccau

SEQ ID NO: 1218 - RNA, 19 nt, Artificial Sequence
  Description of Artificial Sequence: Synthetic oligonucleotide
uuuggcaccugcagccauu

SEQ ID NO: 1219 - RNA, 19 nt, Artificial Sequence
  Description of Artificial Sequence: Synthetic oligonucleotide
uuggcaccugcagccauuc

SEQ ID NO: 1220 - RNA, 19 nt, Artificial Sequence
  Description of Artificial Sequence: Synthetic oligonucleotide
uggcaccugcagccauucc

SEQ ID NO: 1221 - RNA, 19 nt, Artificial Sequence
  Description of Artificial Sequence: Synthetic oligonucleotide
ggcaccugcagccauucca

SEQ ID NO: 1222 - RNA, 19 nt, Artificial Sequence
  Description of Artificial Sequence: Synthetic oligonucleotide
gcaccugcagccauuccaa

SEQ ID NO: 1223 - RNA, 19 nt, Artificial Sequence
  Description of Artificial Sequence: Synthetic oligonucleotide
caccugcagccauuccaac

SEQ ID NO: 1224 - RNA, 19 nt, Artificial Sequence
  Description of Artificial Sequence: Synthetic oligonucleotide
accugcagccauuccaacc

SEQ ID NO: 1225 - RNA, 19 nt, Artificial Sequence
  Description of Artificial Sequence: Synthetic oligonucleotide
ccugcagccauuccaaccu

SEQ ID NO: 1226 - RNA, 19 nt, Artificial Sequence
  Description of Artificial Sequence: Synthetic oligonucleotide
cugcagccauuccaaccuc

SEQ ID NO: 1227 - RNA, 19 nt, Artificial Sequence
  Description of Artificial Sequence: Synthetic oligonucleotide
ugcagccauuccaaccuca

SEQ ID NO: 1228 - RNA, 19 nt, Artificial Sequence
  Description of Artificial Sequence: Synthetic oligonucleotide
gcagccauuccaaccucaa

SEQ ID NO: 1229 - RNA, 19 nt, Artificial Sequence
  Description of Artificial Sequence: Synthetic oligonucleotide
cagccauuccaaccucaac

SEQ ID NO: 1230 - RNA, 19 nt, Artificial Sequence
  Description of Artificial Sequence: Synthetic oligonucleotide
agccauuccaaccucaacg

SEQ ID NO: 1231 - RNA, 19 nt, Artificial Sequence
  Description of Artificial Sequence: Synthetic oligonucleotide
gccauuccaaccucaacgg

SEQ ID NO: 1232 - RNA, 19 nt, Artificial Sequence
  Description of Artificial Sequence: Synthetic oligonucleotide
ccauuccaaccucaacggc

SEQ ID NO: 1233 - RNA, 19 nt, Artificial Sequence
  Description of Artificial Sequence: Synthetic oligonucleotide
cauuccaaccucaacggcc

SEQ ID NO: 1234 - RNA, 19 nt, Artificial Sequence
  Description of Artificial Sequence: Synthetic oligonucleotide
auuccaaccucaacggcca

SEQ ID NO: 1235 - RNA, 19 nt, Artificial Sequence
  Description of Artificial Sequence: Synthetic oligonucleotide
uuccaaccucaacggccag

SEQ ID NO: 1236 - RNA, 19 nt, Artificial Sequence
  Description of Artificial Sequence: Synthetic oligonucleotide
uccaaccucaacggccagu

SEQ ID NO: 1237 - RNA, 19 nt, Artificial Sequence
  Description of Artificial Sequence: Synthetic oligonucleotide
ccaaccucaacggccagua

SEQ ID NO: 1238 - RNA, 19 nt, Artificial Sequence
  Description of Artificial Sequence: Synthetic oligonucleotide
caaccucaacggccaguac

SEQ ID NO: 1239 - RNA, 19 nt, Artificial Sequence
  Description of Artificial Sequence: Synthetic oligonucleotide
aaccucaacggccaguacu

SEQ ID NO: 1240 - RNA, 19 nt, Artificial Sequence
  Description of Artificial Sequence: Synthetic oligonucleotide
accucaacggccaguacuu

SEQ ID NO: 1241 - RNA, 19 nt, Artificial Sequence
  Description of Artificial Sequence: Synthetic oligonucleotide
ccucaacggccaguacuuc

SEQ ID NO: 1242 - RNA, 19 nt, Artificial Sequence
  Description of Artificial Sequence: Synthetic oligonucleotide
cucaacggccaguacuucc

SEQ ID NO: 1243 - RNA, 19 nt, Artificial Sequence
  Description of Artificial Sequence: Synthetic oligonucleotide
ucaacggccaguacuuccg

SEQ ID NO: 1244 - RNA, 19 nt, Artificial Sequence
  Description of Artificial Sequence: Synthetic oligonucleotide
caacggccaguacuuccgc

SEQ ID NO: 1245 - RNA, 19 nt, Artificial Sequence
  Description of Artificial Sequence: Synthetic oligonucleotide
aacggccaguacuuccgcu

SEQ ID NO: 1246 - RNA, 19 nt, Artificial Sequence
  Description of Artificial Sequence: Synthetic oligonucleotide
acggccaguacuuccgcuc

SEQ ID NO: 1247 - RNA, 19 nt, Artificial Sequence
  Description of Artificial Sequence: Synthetic oligonucleotide
cggccaguacuuccgcucc

SEQ ID NO: 1248 - RNA, 19 nt, Artificial Sequence
  Description of Artificial Sequence: Synthetic oligonucleotide
ggccaguacuuccgcucca

SEQ ID NO: 1249 - RNA, 19 nt, Artificial Sequence
  Description of Artificial Sequence: Synthetic oligonucleotide
gccaguacuuccgcuccau

SEQ ID NO: 1250 - RNA, 19 nt, Artificial Sequence
  Description of Artificial Sequence: Synthetic oligonucleotide
ccaguacuuccgcuccauc

SEQ ID NO: 1251 - RNA, 19 nt, Artificial Sequence
  Description of Artificial Sequence: Synthetic oligonucleotide
caguacuuccgcuccaucc

SEQ ID NO: 1252 - RNA, 19 nt, Artificial Sequence
  Description of Artificial Sequence: Synthetic oligonucleotide
aguacuuccgcuccauccc

SEQ ID NO: 1253 - RNA, 19 nt, Artificial Sequence
  Description of Artificial Sequence: Synthetic oligonucleotide
guacuuccgcuccauccca

SEQ ID NO: 1254 - RNA, 19 nt, Artificial Sequence
  Description of Artificial Sequence: Synthetic oligonucleotide
uacuuccgcuccaucccac

SEQ ID NO: 1255 - RNA, 19 nt, Artificial Sequence
  Description of Artificial Sequence: Synthetic oligonucleotide
acuuccgcuccaucccaca

SEQ ID NO: 1256 - RNA, 19 nt, Artificial Sequence
  Description of Artificial Sequence: Synthetic oligonucleotide
cuuccgcuccaucccacag

SEQ ID NO: 1257 - RNA, 19 nt, Artificial Sequence
  Description of Artificial Sequence: Synthetic oligonucleotide
uuccgcuccaucccacagc

SEQ ID NO: 1258 - RNA, 19 nt, Artificial Sequence
  Description of Artificial Sequence: Synthetic oligonucleotide
uccgcuccaucccacagca

SEQ ID NO: 1259 - RNA, 19 nt, Artificial Sequence
  Description of Artificial Sequence: Synthetic oligonucleotide
ccgcuccaucccacagcag

SEQ ID NO: 1260 - RNA, 19 nt, Artificial Sequence
  Description of Artificial Sequence: Synthetic oligonucleotide
cgcuccaucccacagcagc

SEQ ID NO: 1261 - RNA, 19 nt, Artificial Sequence
  Description of Artificial Sequence: Synthetic oligonucleotide
gcuccaucccacagcagcg

SEQ ID NO: 1262 - RNA, 19 nt, Artificial Sequence
  Description of Artificial Sequence: Synthetic oligonucleotide
cuccaucccacagcagcgg

SEQ ID NO: 1263 - RNA, 19 nt, Artificial Sequence
  Description of Artificial Sequence: Synthetic oligonucleotide
uccaucccacagcagcggc

SEQ ID NO: 1264 - RNA, 19 nt, Artificial Sequence
  Description of Artificial Sequence: Synthetic oligonucleotide
ccaucccacagcagcggca

SEQ ID NO: 1265 - RNA, 19 nt, Artificial Sequence
  Description of Artificial Sequence: Synthetic oligonucleotide
caucccacagcagcggcag

SEQ ID NO: 1266 - RNA, 19 nt, Artificial Sequence
  Description of Artificial Sequence: Synthetic oligonucleotide
aucccacagcagcggcaga

SEQ ID NO: 1267 - RNA, 19 nt, Artificial Sequence
  Description of Artificial Sequence: Synthetic oligonucleotide
ucccacagcagcggcagaa

SEQ ID NO: 1268 - RNA, 19 nt, Artificial Sequence
  Description of Artificial Sequence: Synthetic oligonucleotide
cccacagcagcggcagaag

SEQ ID NO: 1269 - RNA, 19 nt, Artificial Sequence
  Description of Artificial Sequence: Synthetic oligonucleotide
ccacagcagcggcagaagc

SEQ ID NO: 1270 - RNA, 19 nt, Artificial Sequence
  Description of Artificial Sequence: Synthetic oligonucleotide
cacagcagcggcagaagcu

SEQ ID NO: 1271 - RNA, 19 nt, Artificial Sequence
  Description of Artificial Sequence: Synthetic oligonucleotide
acagcagcggcagaagcuu

SEQ ID NO: 1272 - RNA, 19 nt, Artificial Sequence
  Description of Artificial Sequence: Synthetic oligonucleotide
cagcagcggcagaagcuua

SEQ ID NO: 1273 - RNA, 19 nt, Artificial Sequence
  Description of Artificial Sequence: Synthetic oligonucleotide
agcagcggcagaagcuuaa

SEQ ID NO: 1274 - RNA, 19 nt, Artificial Sequence
  Description of Artificial Sequence: Synthetic oligonucleotide
gcagcggcagaagcuuaag

SEQ ID NO: 1275 - RNA, 19 nt, Artificial Sequence
  Description of Artificial Sequence: Synthetic oligonucleotide
cagcggcagaagcuuaaga

SEQ ID NO: 1276 - RNA, 19 nt, Artificial Sequence
  Description of Artificial Sequence: Synthetic oligonucleotide
agcggcagaagcuuaagaa

SEQ ID NO: 1277 - RNA, 19 nt, Artificial Sequence
  Description of Artificial Sequence: Synthetic oligonucleotide
gcggcagaagcuuaagaag

SEQ ID NO: 1278 - RNA, 19 nt, Artificial Sequence
  Description of Artificial Sequence: Synthetic oligonucleotide
cggcagaagcuuaagaagg

SEQ ID NO: 1279 - RNA, 19 nt, Artificial Sequence
  Description of Artificial Sequence: Synthetic oligonucleotide
ggcagaagcuuaagaaggg

SEQ ID NO: 1280 - RNA, 19 nt, Artificial Sequence
  Description of Artificial Sequence: Synthetic oligonucleotide
gcagaagcuuaagaaggga

SEQ ID NO: 1281 - RNA, 19 nt, Artificial Sequence
  Description of Artificial Sequence: Synthetic oligonucleotide
cagaagcuuaagaagggaa

SEQ ID NO: 1282 - RNA, 19 nt, Artificial Sequence
  Description of Artificial Sequence: Synthetic oligonucleotide
agaagcuuaagaagggaau

SEQ ID NO: 1283 - RNA, 19 nt, Artificial Sequence
  Description of Artificial Sequence: Synthetic oligonucleotide
gaagcuuaagaagggaauc

SEQ ID NO: 1284 - RNA, 19 nt, Artificial Sequence
  Description of Artificial Sequence: Synthetic oligonucleotide
aagcuuaagaagggaaucu

SEQ ID NO: 1285 - RNA, 19 nt, Artificial Sequence
  Description of Artificial Sequence: Synthetic oligonucleotide
agcuuaagaagggaaucuu

SEQ ID NO: 1286 - RNA, 19 nt, Artificial Sequence
  Description of Artificial Sequence: Synthetic oligonucleotide
gcuuaagaagggaaucuuc

SEQ ID NO: 1287 - RNA, 19 nt, Artificial Sequence
  Description of Artificial Sequence: Synthetic oligonucleotide
cuuaagaagggaaucuucu

SEQ ID NO: 1288 - RNA, 19 nt, Artificial Sequence
  Description of Artificial Sequence: Synthetic oligonucleotide
uuaagaagggaaucuucug

SEQ ID NO: 1289 - RNA, 19 nt, Artificial Sequence
  Description of Artificial Sequence: Synthetic oligonucleotide
uaagaagggaaucuucugg

SEQ ID NO: 1290 - RNA, 19 nt, Artificial Sequence
  Description of Artificial Sequence: Synthetic oligonucleotide
aagaagggaaucuucugga

SEQ ID NO: 1291 - RNA, 19 nt, Artificial Sequence
  Description of Artificial Sequence: Synthetic oligonucleotide
agaagggaaucuucuggaa

SEQ ID NO: 1292 - RNA, 19 nt, Artificial Sequence
  Description of Artificial Sequence: Synthetic oligonucleotide
gaagggaaucuucuggaag

SEQ ID NO: 1293 - RNA, 19 nt, Artificial Sequence
  Description of Artificial Sequence: Synthetic oligonucleotide
aagggaaucuucuggaaga

SEQ ID NO: 1294 - RNA, 19 nt, Artificial Sequence
  Description of Artificial Sequence: Synthetic oligonucleotide
agggaaucuucuggaagac

SEQ ID NO: 1295 - RNA, 19 nt, Artificial Sequence
  Description of Artificial Sequence: Synthetic oligonucleotide
gggaaucuucuggaagacc

SEQ ID NO: 1296 - RNA, 19 nt, Artificial Sequence
  Description of Artificial Sequence: Synthetic oligonucleotide
ggaaucuucuggaagaccu

SEQ ID NO: 1297 - RNA, 19 nt, Artificial Sequence
  Description of Artificial Sequence: Synthetic oligonucleotide
gaaucuucuggaagaccug

SEQ ID NO: 1298 - RNA, 19 nt, Artificial Sequence
  Description of Artificial Sequence: Synthetic oligonucleotide
aaucuucuggaagaccugg

SEQ ID NO: 1299 - RNA, 19 nt, Artificial Sequence
  Description of Artificial Sequence: Synthetic oligonucleotide
aucuucuggaagaccuggc

SEQ ID NO: 1300 - RNA, 19 nt, Artificial Sequence
  Description of Artificial Sequence: Synthetic oligonucleotide
ucuucuggaagaccuggcg

SEQ ID NO: 1301 - RNA, 19 nt, Artificial Sequence
  Description of Artificial Sequence: Synthetic oligonucleotide
cuucuggaagaccuggcgg

SEQ ID NO: 1302 - RNA, 19 nt, Artificial Sequence
  Description of Artificial Sequence: Synthetic oligonucleotide
uucuggaagaccuggcggg

SEQ ID NO: 1303 - RNA, 19 nt, Artificial Sequence
  Description of Artificial Sequence: Synthetic oligonucleotide
ucuggaagaccuggcgggg

SEQ ID NO: 1304 - RNA, 19 nt, Artificial Sequence
  Description of Artificial Sequence: Synthetic oligonucleotide
cuggaagaccuggcggggc

SEQ ID NO: 1305 - RNA, 19 nt, Artificial Sequence
  Description of Artificial Sequence: Synthetic oligonucleotide
uggaagaccuggcggggcc

SEQ ID NO: 1306 - RNA, 19 nt, Artificial Sequence
  Description of Artificial Sequence: Synthetic oligonucleotide
ggaagaccuggcggggccg

SEQ ID NO: 1307 - RNA, 19 nt, Artificial Sequence
  Description of Artificial Sequence: Synthetic oligonucleotide
gaagaccuggcggggccgc

SEQ ID NO: 1308 - RNA, 19 nt, Artificial Sequence
  Description of Artificial Sequence: Synthetic oligonucleotide
aagaccuggcggggccgcu

SEQ ID NO: 1309 - RNA, 19 nt, Artificial Sequence
  Description of Artificial Sequence: Synthetic oligonucleotide
agaccuggcggggccgcua

SEQ ID NO: 1310 - RNA, 19 nt, Artificial Sequence
  Description of Artificial Sequence: Synthetic oligonucleotide
gaccuggcggggccgcuac

SEQ ID NO: 1311 - RNA, 19 nt, Artificial Sequence
  Description of Artificial Sequence: Synthetic oligonucleotide
accuggcggggccgcuacu

SEQ ID NO: 1312 - RNA, 19 nt, Artificial Sequence
  Description of Artificial Sequence: Synthetic oligonucleotide
ccuggcggggccgcuacua

SEQ ID NO: 1313 - RNA, 19 nt, Artificial Sequence
  Description of Artificial Sequence: Synthetic oligonucleotide
cuggcggggccgcuacuac

SEQ ID NO: 1314 - RNA, 19 nt, Artificial Sequence
  Description of Artificial Sequence: Synthetic oligonucleotide
uggcggggccgcuacuacc

SEQ ID NO: 1315 - RNA, 19 nt, Artificial Sequence
  Description of Artificial Sequence: Synthetic oligonucleotide
ggcggggccgcuacuaccc

SEQ ID NO: 1316 - RNA, 19 nt, Artificial Sequence
  Description of Artificial Sequence: Synthetic oligonucleotide
gcggggccgcuacuacccg

SEQ ID NO: 1317 - RNA, 19 nt, Artificial Sequence
  Description of Artificial Sequence: Synthetic oligonucleotide
cggggccgcuacuacccgc

SEQ ID NO: 1318 - RNA, 19 nt, Artificial Sequence
  Description of Artificial Sequence: Synthetic oligonucleotide
ggggccgcuacuacccgcu

SEQ ID NO: 1319 - RNA, 19 nt, Artificial Sequence
  Description of Artificial Sequence: Synthetic oligonucleotide
gggccgcuacuacccgcug

SEQ ID NO: 1320 - RNA, 19 nt, Artificial Sequence
  Description of Artificial Sequence: Synthetic oligonucleotide
ggccgcuacuacccgcugc

SEQ ID NO: 1321 - RNA, 19 nt, Artificial Sequence
  Description of Artificial Sequence: Synthetic oligonucleotide
gccgcuacuacccgcugca

SEQ ID NO: 1322 - RNA, 19 nt, Artificial Sequence
  Description of Artificial Sequence: Synthetic oligonucleotide
ccgcuacuacccgcugcag

SEQ ID NO: 1323 - RNA, 19 nt, Artificial Sequence
  Description of Artificial Sequence: Synthetic oligonucleotide
cgcuacuacccgcugcagg

SEQ ID NO: 1324 - RNA, 19 nt, Artificial Sequence
  Description of Artificial Sequence: Synthetic oligonucleotide
gcuacuacccgcugcaggc

SEQ ID NO: 1325 - RNA, 19 nt, Artificial Sequence
  Description of Artificial Sequence: Synthetic oligonucleotide
cuacuacccgcugcaggcc

SEQ ID NO: 1326 - RNA, 19 nt, Artificial Sequence
  Description of Artificial Sequence: Synthetic oligonucleotide
uacuacccgcugcaggcca

SEQ ID NO: 1327 - RNA, 19 nt, Artificial Sequence
  Description of Artificial Sequence: Synthetic oligonucleotide
acuacccgcugcaggccac

SEQ ID NO: 1328 - RNA, 19 nt, Artificial Sequence
  Description of Artificial Sequence: Synthetic oligonucleotide
cuacccgcugcaggccacc

SEQ ID NO: 1329 - RNA, 19 nt, Artificial Sequence
  Description of Artificial Sequence: Synthetic oligonucleotide
uacccgcugcaggccacca

SEQ ID NO: 1330 - RNA, 19 nt, Artificial Sequence
  Description of Artificial Sequence: Synthetic oligonucleotide
acccgcugcaggccaccac

SEQ ID NO: 1331 - RNA, 19 nt, Artificial Sequence
  Description of Artificial Sequence: Synthetic oligonucleotide
cccgcugcaggccaccacc

SEQ ID NO: 1332 - RNA, 19 nt, Artificial Sequence
  Description of Artificial Sequence: Synthetic oligonucleotide
ccgcugcaggccaccacca

SEQ ID NO: 1333 - RNA, 19 nt, Artificial Sequence
  Description of Artificial Sequence: Synthetic oligonucleotide
cgcugcaggccaccaccau

SEQ ID NO: 1334 - RNA, 19 nt, Artificial Sequence
  Description of Artificial Sequence: Synthetic oligonucleotide
gcugcaggccaccaccaug

SEQ ID NO: 1335 - RNA, 19 nt, Artificial Sequence
  Description of Artificial Sequence: Synthetic oligonucleotide
cugcaggccaccaccaugu

SEQ ID NO: 1336 - RNA, 19 nt, Artificial Sequence
  Description of Artificial Sequence: Synthetic oligonucleotide
ugcaggccaccaccauguu

SEQ ID NO: 1337 - RNA, 19 nt, Artificial Sequence
  Description of Artificial Sequence: Synthetic oligonucleotide
gcaggccaccaccauguug

SEQ ID NO: 1338 - RNA, 19 nt, Artificial Sequence
  Description of Artificial Sequence: Synthetic oligonucleotide
caggccaccaccauguuga

SEQ ID NO: 1339 - RNA, 19 nt, Artificial Sequence
  Description of Artificial Sequence: Synthetic oligonucleotide
aggccaccaccauguugau

SEQ ID NO: 1340 - RNA, 19 nt, Artificial Sequence
  Description of Artificial Sequence: Synthetic oligonucleotide
ggccaccaccauguugauc

SEQ ID NO: 1341 - RNA, 19 nt, Artificial Sequence
  Description of Artificial Sequence: Synthetic oligonucleotide
gccaccaccauguugaucc

SEQ ID NO: 1342 - RNA, 19 nt, Artificial Sequence
  Description of Artificial Sequence: Synthetic oligonucleotide
ccaccaccauguugaucca

SEQ ID NO: 1343 - RNA, 19 nt, Artificial Sequence
  Description of Artificial Sequence: Synthetic oligonucleotide
caccaccauguugauccag

SEQ ID NO: 1344 - RNA, 19 nt, Artificial Sequence
  Description of Artificial Sequence: Synthetic oligonucleotide
accaccauguugauccagc

SEQ ID NO: 1345 - RNA, 19 nt, Artificial Sequence
  Description of Artificial Sequence: Synthetic oligonucleotide
ccaccauguugauccagcc

SEQ ID NO: 1346 - RNA, 19 nt, Artificial Sequence
  Description of Artificial Sequence: Synthetic oligonucleotide
caccauguugauccagccc

SEQ ID NO: 1347 - RNA, 19 nt, Artificial Sequence
  Description of Artificial Sequence: Synthetic oligonucleotide
accauguugauccagccca

SEQ ID NO: 1348 - RNA, 19 nt, Artificial Sequence
  Description of Artificial Sequence: Synthetic oligonucleotide
ccauguugauccagcccau

SEQ ID NO: 1349 - RNA, 19 nt, Artificial Sequence
  Description of Artificial Sequence: Synthetic oligonucleotide
cauguugauccagcccaug

SEQ ID NO: 1350 - RNA, 19 nt, Artificial Sequence
  Description of Artificial Sequence: Synthetic oligonucleotide
auguugauccagcccaugg

SEQ ID NO: 1351 - RNA, 19 nt, Artificial Sequence
  Description of Artificial Sequence: Synthetic oligonucleotide
uguugauccagcccauggc

SEQ ID NO: 1352 - RNA, 19 nt, Artificial Sequence
  Description of Artificial Sequence: Synthetic oligonucleotide
guugauccagcccauggca

SEQ ID NO: 1353 - RNA, 19 nt, Artificial Sequence
  Description of Artificial Sequence: Synthetic oligonucleotide
uugauccagcccauggcag

SEQ ID NO: 1354 - RNA, 19 nt, Artificial Sequence
  Description of Artificial Sequence: Synthetic oligonucleotide
ugauccagcccauggcagc

SEQ ID NO: 1355 - RNA, 19 nt, Artificial Sequence
  Description of Artificial Sequence: Synthetic oligonucleotide
gauccagcccauggcagca

SEQ ID NO: 1356 - RNA, 19 nt, Artificial Sequence
  Description of Artificial Sequence: Synthetic oligonucleotide
auccagcccauggcagcag

SEQ ID NO: 1357 - RNA, 19 nt, Artificial Sequence
  Description of Artificial Sequence: Synthetic oligonucleotide
uccagcccauggcagcaga

SEQ ID NO: 1358 - RNA, 19 nt, Artificial Sequence
  Description of Artificial Sequence: Synthetic oligonucleotide
ccagcccauggcagcagag

SEQ ID NO: 1359 - RNA, 19 nt, Artificial Sequence
  Description of Artificial Sequence: Synthetic oligonucleotide
cagcccauggcagcagagg

SEQ ID NO: 1360 - RNA, 19 nt, Artificial Sequence
  Description of Artificial Sequence: Synthetic oligonucleotide
agcccauggcagcagaggc

SEQ ID NO: 1361 - RNA, 19 nt, Artificial Sequence
  Description of Artificial Sequence: Synthetic oligonucleotide
gcccauggcagcagaggca

SEQ ID NO: 1362 - RNA, 19 nt, Artificial Sequence
  Description of Artificial Sequence: Synthetic oligonucleotide
cccauggcagcagaggcag

SEQ ID NO: 1363 - RNA, 19 nt, Artificial Sequence
  Description of Artificial Sequence: Synthetic oligonucleotide
ccauggcagcagaggcagc

SEQ ID NO: 1364 - RNA, 19 nt, Artificial Sequence
  Description of Artificial Sequence: Synthetic oligonucleotide
cauggcagcagaggcagcc

SEQ ID NO: 1365 - RNA, 19 nt, Artificial Sequence
  Description of Artificial Sequence: Synthetic oligonucleotide
auggcagcagaggcagccu

SEQ ID NO: 1366 - RNA, 19 nt, Artificial Sequence
  Description of Artificial Sequence: Synthetic oligonucleotide
uggcagcagaggcagccuc

SEQ ID NO: 1367 - RNA, 19 nt, Artificial Sequence
  Description of Artificial Sequence: Synthetic oligonucleotide
ggcagcagaggcagccucc

SEQ ID NO: 1368 - RNA, 19 nt, Artificial Sequence
  Description of Artificial Sequence: Synthetic oligonucleotide
gcagcagaggcagccuccu

SEQ ID NO: 1369 - RNA, 19 nt, Artificial Sequence
  Description of Artificial Sequence: Synthetic oligonucleotide
cagcagaggcagccuccua

SEQ ID NO: 1370 - RNA, 19 nt, Artificial Sequence
  Description of Artificial Sequence: Synthetic oligonucleotide
agcagaggcagccuccuag

SEQ ID NO: 1371 - RNA, 19 nt, Artificial Sequence
  Description of Artificial Sequence: Synthetic oligonucleotide
gcagaggcagccuccuagc

SEQ ID NO: 1372 - RNA, 19 nt, Artificial Sequence
  Description of Artificial Sequence: Synthetic oligonucleotide
cagaggcagccuccuagcg

SEQ ID NO: 1373 - RNA, 19 nt, Artificial Sequence
  Description of Artificial Sequence: Synthetic oligonucleotide
agaggcagccuccuagcgu

SEQ ID NO: 1374 - RNA, 19 nt, Artificial Sequence
  Description of Artificial Sequence: Synthetic oligonucleotide
gaggcagccuccuagcguc

SEQ ID NO: 1375 - RNA, 19 nt, Artificial Sequence
  Description of Artificial Sequence: Synthetic oligonucleotide
aggcagccuccuagcgucc

SEQ ID NO: 1376 - RNA, 19 nt, Artificial Sequence
  Description of Artificial Sequence: Synthetic oligonucleotide
ggcagccuccuagcguccu

SEQ ID NO: 1377 - RNA, 19 nt, Artificial Sequence
  Description of Artificial Sequence: Synthetic oligonucleotide
gcagccuccuagcguccug

SEQ ID NO: 1378 - RNA, 19 nt, Artificial Sequence
  Description of Artificial Sequence: Synthetic oligonucleotide
cagccuccuagcguccugg

SEQ ID NO: 1379 - RNA, 19 nt, Artificial Sequence
  Description of Artificial Sequence: Synthetic oligonucleotide
agccuccuagcguccuggc

SEQ ID NO: 1380 - RNA, 19 nt, Artificial Sequence
  Description of Artificial Sequence: Synthetic oligonucleotide
gccuccuagcguccuggcu

SEQ ID NO: 1381 - RNA, 19 nt, Artificial Sequence
  Description of Artificial Sequence: Synthetic oligonucleotide
ccuccuagcguccuggcug

SEQ ID NO: 1382 - RNA, 19 nt, Artificial Sequence
  Description of Artificial Sequence: Synthetic oligonucleotide
cuccuagcguccuggcugg

SEQ ID NO: 1383 - RNA, 19 nt, Artificial Sequence
  Description of Artificial Sequence: Synthetic oligonucleotide
uccuagcguccuggcuggg

SEQ ID NO: 1384 - RNA, 19 nt, Artificial Sequence
  Description of Artificial Sequence: Synthetic oligonucleotide
ccuagcguccuggcugggc

SEQ ID NO: 1385 - RNA, 19 nt, Artificial Sequence
  Description of Artificial Sequence: Synthetic oligonucleotide
cuagcguccuggcugggcc

SEQ ID NO: 1386 - RNA, 19 nt, Artificial Sequence
  Description of Artificial Sequence: Synthetic oligonucleotide
uagcguccuggcugggccu

SEQ ID NO: 1387 - RNA, 19 nt, Artificial Sequence
  Description of Artificial Sequence: Synthetic oligonucleotide
agcguccuggcugggccug

SEQ ID NO: 1388 - RNA, 19 nt, Artificial Sequence
  Description of Artificial Sequence: Synthetic oligonucleotide
gcguccuggcugggccugg

SEQ ID NO: 1389 - RNA, 19 nt, Artificial Sequence
  Description of Artificial Sequence: Synthetic oligonucleotide
cguccuggcugggccuggu

SEQ ID NO: 1390 - RNA, 19 nt, Artificial Sequence
  Description of Artificial Sequence: Synthetic oligonucleotide
guccuggcugggccugguc

SEQ ID NO: 1391 - RNA, 19 nt, Artificial Sequence
  Description of Artificial Sequence: Synthetic oligonucleotide
uccuggcugggccuggucc

SEQ ID NO: 1392 - RNA, 19 nt, Artificial Sequence
  Description of Artificial Sequence: Synthetic oligonucleotide
ccuggcugggccugguccc

SEQ ID NO: 1393 - RNA, 19 nt, Artificial Sequence
  Description of Artificial Sequence: Synthetic oligonucleotide
cuggcugggccugguccca

SEQ ID NO: 1394 - RNA, 19 nt, Artificial Sequence
  Description of Artificial Sequence: Synthetic oligonucleotide
uggcugggccuggucccag

SEQ ID NO: 1395 - RNA, 19 nt, Artificial Sequence
  Description of Artificial Sequence: Synthetic oligonucleotide
ggcugggccuggucccagg

SEQ ID NO: 1396 - RNA, 19 nt, Artificial Sequence
  Description of Artificial Sequence: Synthetic oligonucleotide
gcugggccuggucccaggc

SEQ ID NO: 1397 - RNA, 19 nt, Artificial Sequence
  Description of Artificial Sequence: Synthetic oligonucleotide
cugggccuggucccaggcc

SEQ ID NO: 1398 - RNA, 19 nt, Artificial Sequence
  Description of Artificial Sequence: Synthetic oligonucleotide
ugggccuggucccaggccc

SEQ ID NO: 1399 - RNA, 19 nt, Artificial Sequence
  Description of Artificial Sequence: Synthetic oligonucleotide
gggccuggucccaggccca

SEQ ID NO: 1400 - RNA, 19 nt, Artificial Sequence
  Description of Artificial Sequence: Synthetic oligonucleotide
ggccuggucccaggcccac

SEQ ID NO: 1401 - RNA, 19 nt, Artificial Sequence
  Description of Artificial Sequence: Synthetic oligonucleotide
gccuggucccaggcccacg

SEQ ID NO: 1402 - RNA, 19 nt, Artificial Sequence
  Description of Artificial Sequence: Synthetic oligonucleotide
ccuggucccaggcccacga

SEQ ID NO: 1403 - RNA, 19 nt, Artificial Sequence
  Description of Artificial Sequence: Synthetic oligonucleotide
cuggucccaggcccacgaa

SEQ ID NO: 1404 - RNA, 19 nt, Artificial Sequence
  Description of Artificial Sequence: Synthetic oligonucleotide
uggucccaggcccacgaaa

SEQ ID NO: 1405 - RNA, 19 nt, Artificial Sequence
  Description of Artificial Sequence: Synthetic oligonucleotide
ggucccaggcccacgaaag

SEQ ID NO: 1406 - RNA, 19 nt, Artificial Sequence
  Description of Artificial Sequence: Synthetic oligonucleotide
gucccaggcccacgaaaga

SEQ ID NO: 1407 - RNA, 19 nt, Artificial Sequence
  Description of Artificial Sequence: Synthetic oligonucleotide
ucccaggcccacgaaagac

SEQ ID NO: 1408 - RNA, 19 nt, Artificial Sequence
  Description of Artificial Sequence: Synthetic oligonucleotide
cccaggcccacgaaagacg

SEQ ID NO: 1409 - RNA, 19 nt, Artificial Sequence
  Description of Artificial Sequence: Synthetic oligonucleotide
ccaggcccacgaaagacgg

SEQ ID NO: 1410 - RNA, 19 nt, Artificial Sequence
  Description of Artificial Sequence: Synthetic oligonucleotide
caggcccacgaaagacggu

SEQ ID NO: 1411 - RNA, 19 nt, Artificial Sequence
  Description of Artificial Sequence: Synthetic oligonucleotide
aggcccacgaaagacggug

SEQ ID NO: 1412 - RNA, 19 nt, Artificial Sequence
  Description of Artificial Sequence: Synthetic oligonucleotide
ggcccacgaaagacgguga

SEQ ID NO: 1413 - RNA, 19 nt, Artificial Sequence
  Description of Artificial Sequence: Synthetic oligonucleotide
gcccacgaaagacggugac

SEQ ID NO: 1414 - RNA, 19 nt, Artificial Sequence
  Description of Artificial Sequence: Synthetic oligonucleotide
cccacgaaagacggugacu

SEQ ID NO: 1415 - RNA, 19 nt, Artificial Sequence
  Description of Artificial Sequence: Synthetic oligonucleotide
ccacgaaagacggugacuc

SEQ ID NO: 1416 - RNA, 19 nt, Artificial Sequence
  Description of Artificial Sequence: Synthetic oligonucleotide
cacgaaagacggugacucu

SEQ ID NO: 1417 - RNA, 19 nt, Artificial Sequence
  Description of Artificial Sequence: Synthetic oligonucleotide
acgaaagacggugacucuu

SEQ ID NO: 1418 - RNA, 19 nt, Artificial Sequence
  Description of Artificial Sequence: Synthetic oligonucleotide
cgaaagacggugacucuug

SEQ ID NO: 1419 - RNA, 19 nt, Artificial Sequence
  Description of Artificial Sequence: Synthetic oligonucleotide
gaaagacggugacucuugg

SEQ ID NO: 1420 - RNA, 19 nt, Artificial Sequence
  Description of Artificial Sequence: Synthetic oligonucleotide
aaagacggugacucuuggc

SEQ ID NO: 1421 - RNA, 19 nt, Artificial Sequence
  Description of Artificial Sequence: Synthetic oligonucleotide
aagacggugacucuuggcu

SEQ ID NO: 1422 - RNA, 19 nt, Artificial Sequence
  Description of Artificial Sequence: Synthetic oligonucleotide
agacggugacucuuggcuc

SEQ ID NO: 1423 - RNA, 19 nt, Artificial Sequence
  Description of Artificial Sequence: Synthetic oligonucleotide
gacggugacucuuggcucu

SEQ ID NO: 1424 - RNA, 19 nt, Artificial Sequence
  Description of Artificial Sequence: Synthetic oligonucleotide
acggugacucuuggcucug

SEQ ID NO: 1425 - RNA, 19 nt, Artificial Sequence
  Description of Artificial Sequence: Synthetic oligonucleotide
cggugacucuuggcucugc

SEQ ID NO: 1426 - RNA, 19 nt, Artificial Sequence
  Description of Artificial Sequence: Synthetic oligonucleotide
ggugacucuuggcucugcc

SEQ ID NO: 1427 - RNA, 19 nt, Artificial Sequence
  Description of Artificial Sequence: Synthetic oligonucleotide
gugacucuuggcucugccc

SEQ ID NO: 1428 - RNA, 19 nt, Artificial Sequence
  Description of Artificial Sequence: Synthetic oligonucleotide
ugacucuuggcucugcccg

SEQ ID NO: 1429 - RNA, 19 nt, Artificial Sequence
  Description of Artificial Sequence: Synthetic oligonucleotide
gacucuuggcucugcccga

SEQ ID NO: 1430 - RNA, 19 nt, Artificial Sequence
  Description of Artificial Sequence: Synthetic oligonucleotide
acucuuggcucugcccgag

SEQ ID NO: 1431 - RNA, 19 nt, Artificial Sequence
  Description of Artificial Sequence: Synthetic oligonucleotide
cucuuggcucugcccgagg

SEQ ID NO: 1432 - RNA, 19 nt, Artificial Sequence
  Description of Artificial Sequence: Synthetic oligonucleotide
ucuuggcucugcccgagga

SEQ ID NO: 1433 - RNA, 19 nt, Artificial Sequence
  Description of Artificial Sequence: Synthetic oligonucleotide
cuuggcucugcccgaggau

SEQ ID NO: 1434 - RNA, 19 nt, Artificial Sequence
  Description of Artificial Sequence: Synthetic oligonucleotide
uuggcucugcccgaggaug

SEQ ID NO: 1435 - RNA, 19 nt, Artificial Sequence
  Description of Artificial Sequence: Synthetic oligonucleotide
uggcucugcccgaggaugu

SEQ ID NO: 1436 - RNA, 19 nt, Artificial Sequence
  Description of Artificial Sequence: Synthetic oligonucleotide
ggcucugcccgaggaugug

SEQ ID NO: 1437 - RNA, 19 nt, Artificial Sequence
  Description of Artificial Sequence: Synthetic oligonucleotide
gcucugcccgaggaugugg

SEQ ID NO: 1438 - RNA, 19 nt, Artificial Sequence
  Description of Artificial Sequence: Synthetic oligonucleotide
cucugcccgaggauguggc

SEQ ID NO: 1439 - RNA, 19 nt, Artificial Sequence
  Description of Artificial Sequence: Synthetic oligonucleotide
ucugcccgaggauguggcc

SEQ ID NO: 1440 - RNA, 19 nt, Artificial Sequence
  Description of Artificial Sequence: Synthetic oligonucleotide
cugcccgaggauguggccg

SEQ ID NO: 1441 - RNA, 19 nt, Artificial Sequence
  Description of Artificial Sequence: Synthetic oligonucleotide
ugcccgaggauguggccgu

SEQ ID NO: 1442 - RNA, 19 nt, Artificial Sequence
  Description of Artificial Sequence: Synthetic oligonucleotide
gcccgaggauguggccguu

SEQ ID NO: 1443 - RNA, 19 nt, Artificial Sequence
  Description of Artificial Sequence: Synthetic oligonucleotide
cccgaggauguggccguuc

SEQ ID NO: 1444 - RNA, 19 nt, Artificial Sequence
  Description of Artificial Sequence: Synthetic oligonucleotide
ccgaggauguggccguucc

SEQ ID NO: 1445 - RNA, 19 nt, Artificial Sequence
  Description of Artificial Sequence: Synthetic oligonucleotide
cgaggauguggccguuccc

SEQ ID NO: 1446 - RNA, 19 nt, Artificial Sequence
  Description of Artificial Sequence: Synthetic oligonucleotide
gaggauguggccguucccu

SEQ ID NO: 1447 - RNA, 19 nt, Artificial Sequence
  Description of Artificial Sequence: Synthetic oligonucleotide
aggauguggccguucccug

SEQ ID NO: 1448 - RNA, 19 nt, Artificial Sequence
  Description of Artificial Sequence: Synthetic oligonucleotide
ggauguggccguucccugc

SEQ ID NO: 1449 - RNA, 19 nt, Artificial Sequence
  Description of Artificial Sequence: Synthetic oligonucleotide
gauguggccguucccugcc

SEQ ID NO: 1450 - RNA, 19 nt, Artificial Sequence
  Description of Artificial Sequence: Synthetic oligonucleotide
auguggccguucccugccu

SEQ ID NO: 1451 - RNA, 19 nt, Artificial Sequence
  Description of Artificial Sequence: Synthetic oligonucleotide
uguggccguucccugccug

SEQ ID NO: 1452 - RNA, 19 nt, Artificial Sequence
  Description of Artificial Sequence: Synthetic oligonucleotide
guggccguucccugccugg

SEQ ID NO: 1453 - RNA, 19 nt, Artificial Sequence
  Description of Artificial Sequence: Synthetic oligonucleotide
uggccguucccugccuggg

SEQ ID NO: 1454 - RNA, 19 nt, Artificial Sequence
  Description of Artificial Sequence: Synthetic oligonucleotide
ggccguucccugccugggc

SEQ ID NO: 1455 - RNA, 19 nt, Artificial Sequence
  Description of Artificial Sequence: Synthetic oligonucleotide
gccguucccugccugggca

SEQ ID NO: 1456 - RNA, 19 nt, Artificial Sequence
  Description of Artificial Sequence: Synthetic oligonucleotide
ccguucccugccugggcag

SEQ ID NO: 1457 - RNA, 19 nt, Artificial Sequence
  Description of Artificial Sequence: Synthetic oligonucleotide
cguucccugccugggcagg

SEQ ID NO: 1458 - RNA, 19 nt, Artificial Sequence
  Description of Artificial Sequence: Synthetic oligonucleotide
guucccugccugggcaggg

SEQ ID NO: 1459 - RNA, 19 nt, Artificial Sequence
  Description of Artificial Sequence: Synthetic oligonucleotide
uucccugccugggcagggg

SEQ ID NO: 1460 - RNA, 19 nt, Artificial Sequence
  Description of Artificial Sequence: Synthetic oligonucleotide
ucccugccugggcaggggc

SEQ ID NO: 1461 - RNA, 19 nt, Artificial Sequence
  Description of Artificial Sequence: Synthetic oligonucleotide
cccugccugggcaggggcu

SEQ ID NO: 1462 - RNA, 19 nt, Artificial Sequence
  Description of Artificial Sequence: Synthetic oligonucleotide
ccugccugggcaggggcuc

SEQ ID NO: 1463 - RNA, 19 nt, Artificial Sequence
  Description of Artificial Sequence: Synthetic oligonucleotide
cugccugggcaggggcucc

SEQ ID NO: 1464 - RNA, 19 nt, Artificial Sequence
  Description of Artificial Sequence: Synthetic oligonucleotide
ugccugggcaggggcucca

SEQ ID NO: 1465 - RNA, 19 nt, Artificial Sequence
  Description of Artificial Sequence: Synthetic oligonucleotide
gccugggcaggggcuccaa

SEQ ID NO: 1466 - RNA, 19 nt, Artificial Sequence
  Description of Artificial Sequence: Synthetic oligonucleotide
ccugggcaggggcuccaag

SEQ ID NO: 1467 - RNA, 19 nt, Artificial Sequence
  Description of Artificial Sequence: Synthetic oligonucleotide
cugggcaggggcuccaagg

SEQ ID NO: 1468 - RNA, 19 nt, Artificial Sequence
  Description of Artificial Sequence: Synthetic oligonucleotide
ugggcaggggcuccaagga

SEQ ID NO: 1469 - RNA, 19 nt, Artificial Sequence
  Description of Artificial Sequence: Synthetic oligonucleotide
gggcaggggcuccaaggag

SEQ ID NO: 1470 - RNA, 19 nt, Artificial Sequence
  Description of Artificial Sequence: Synthetic oligonucleotide
ggcaggggcuccaaggagg

SEQ ID NO: 1471 - RNA, 19 nt, Artificial Sequence
  Description of Artificial Sequence: Synthetic oligonucleotide
gcaggggcuccaaggaggg

SEQ ID NO: 1472 - RNA, 19 nt, Artificial Sequence
  Description of Artificial Sequence: Synthetic oligonucleotide
caggggcuccaaggagggg

SEQ ID NO: 1473 - RNA, 19 nt, Artificial Sequence
  Description of Artificial Sequence: Synthetic oligonucleotide
aggggcuccaaggaggggc

SEQ ID NO: 1474 - RNA, 19 nt, Artificial Sequence
  Description of Artificial Sequence: Synthetic oligonucleotide
ggggcuccaaggaggggcc

SEQ ID NO: 1475 - RNA, 19 nt, Artificial Sequence
  Description of Artificial Sequence: Synthetic oligonucleotide
gggcuccaaggaggggcca

SEQ ID NO: 1476 - RNA, 19 nt, Artificial Sequence
  Description of Artificial Sequence: Synthetic oligonucleotide
ggcuccaaggaggggccau

SEQ ID NO: 1477 - RNA, 19 nt, Artificial Sequence
  Description of Artificial Sequence: Synthetic oligonucleotide
gcuccaaggaggggccauc

SEQ ID NO: 1478 - RNA, 19 nt, Artificial Sequence
  Description of Artificial Sequence: Synthetic oligonucleotide
cuccaaggaggggccaucu

SEQ ID NO: 1479 - RNA, 19 nt, Artificial Sequence
  Description of Artificial Sequence: Synthetic oligonucleotide
uccaaggaggggccaucug

SEQ ID NO: 1480 - RNA, 19 nt, Artificial Sequence
  Description of Artificial Sequence: Synthetic oligonucleotide
ccaaggaggggccaucugg

SEQ ID NO: 1481 - RNA, 19 nt, Artificial Sequence
  Description of Artificial Sequence: Synthetic oligonucleotide
caaggaggggccaucugga

SEQ ID NO: 1482 - RNA, 19 nt, Artificial Sequence
  Description of Artificial Sequence: Synthetic oligonucleotide
aaggaggggccaucuggaa

SEQ ID NO: 1483 - RNA, 19 nt, Artificial Sequence
  Description of Artificial Sequence: Synthetic oligonucleotide
aggaggggccaucuggaaa

SEQ ID NO: 1484 - RNA, 19 nt, Artificial Sequence
  Description of Artificial Sequence: Synthetic oligonucleotide
ggaggggccaucuggaaac

SEQ ID NO: 1485 - RNA, 19 nt, Artificial Sequence
  Description of Artificial Sequence: Synthetic oligonucleotide
gaggggccaucuggaaacu

SEQ ID NO: 1486 - RNA, 19 nt, Artificial Sequence
  Description of Artificial Sequence: Synthetic oligonucleotide
aggggccaucuggaaacuu

SEQ ID NO: 1487 - RNA, 19 nt, Artificial Sequence
  Description of Artificial Sequence: Synthetic oligonucleotide
ggggccaucuggaaacuug

SEQ ID NO: 1488 - RNA, 19 nt, Artificial Sequence
  Description of Artificial Sequence: Synthetic oligonucleotide
gggccaucuggaaacuugu

SEQ ID NO: 1489 - RNA, 19 nt, Artificial Sequence
  Description of Artificial Sequence: Synthetic oligonucleotide
ggccaucuggaaacuugug

SEQ ID NO: 1490 - RNA, 19 nt, Artificial Sequence
  Description of Artificial Sequence: Synthetic oligonucleotide
gccaucuggaaacuugugg

SEQ ID NO: 1491 - RNA, 19 nt, Artificial Sequence
  Description of Artificial Sequence: Synthetic oligonucleotide
ccaucuggaaacuugugga

SEQ ID NO: 1492 - RNA, 19 nt, Artificial Sequence
  Description of Artificial Sequence: Synthetic oligonucleotide
caucuggaaacuuguggac

SEQ ID NO: 1493 - RNA, 19 nt, Artificial Sequence
  Description of Artificial Sequence: Synthetic oligonucleotide
aucuggaaacuuguggaca

SEQ ID NO: 1494 - RNA, 19 nt, Artificial Sequence
  Description of Artificial Sequence: Synthetic oligonucleotide
ucuggaaacuuguggacag

SEQ ID NO: 1495 - RNA, 19 nt, Artificial Sequence
  Description of Artificial Sequence: Synthetic oligonucleotide
cuggaaacuuguggacaga

SEQ ID NO: 1496 - RNA, 19 nt, Artificial Sequence
  Description of Artificial Sequence: Synthetic oligonucleotide
uggaaacuuguggacagag

SEQ ID NO: 1497 - RNA, 19 nt, Artificial Sequence
  Description of Artificial Sequence: Synthetic oligonucleotide
ggaaacuuguggacagaga

SEQ ID NO: 1498 - RNA, 19 nt, Artificial Sequence
  Description of Artificial Sequence: Synthetic oligonucleotide
gaaacuuguggacagagaa

SEQ ID NO: 1499 - RNA, 19 nt, Artificial Sequence
  Description of Artificial Sequence: Synthetic oligonucleotide
aaacuuguggacagagaag

SEQ ID NO: 1500 - RNA, 19 nt, Artificial Sequence
  Description of Artificial Sequence: Synthetic oligonucleotide
aacuuguggacagagaaga

SEQ ID NO: 1501 - RNA, 19 nt, Artificial Sequence
  Description of Artificial Sequence: Synthetic oligonucleotide
acuuguggacagagaagaa

SEQ ID NO: 1502 - RNA, 19 nt, Artificial Sequence
  Description of Artificial Sequence: Synthetic oligonucleotide
cuuguggacagagaagaag

SEQ ID NO: 1503 - RNA, 19 nt, Artificial Sequence
  Description of Artificial Sequence: Synthetic oligonucleotide
uuguggacagagaagaaga

SEQ ID NO: 1504 - RNA, 19 nt, Artificial Sequence
  Description of Artificial Sequence: Synthetic oligonucleotide
uguggacagagaagaagac

SEQ ID NO: 1505 - RNA, 19 nt, Artificial Sequence
  Description of Artificial Sequence: Synthetic oligonucleotide
guggacagagaagaagacc

SEQ ID NO: 1506 - RNA, 19 nt, Artificial Sequence
  Description of Artificial Sequence: Synthetic oligonucleotide
uggacagagaagaagacca

SEQ ID NO: 1507 - RNA, 19 nt, Artificial Sequence
  Description of Artificial Sequence: Synthetic oligonucleotide
ggacagagaagaagaccac

SEQ ID NO: 1508 - RNA, 19 nt, Artificial Sequence
  Description of Artificial Sequence: Synthetic oligonucleotide
gacagagaagaagaccacg

SEQ ID NO: 1509 - RNA, 19 nt, Artificial Sequence
  Description of Artificial Sequence: Synthetic oligonucleotide
acagagaagaagaccacga

SEQ ID NO: 1510 - RNA, 19 nt, Artificial Sequence
  Description of Artificial Sequence: Synthetic oligonucleotide
cagagaagaagaccacgac

SEQ ID NO: 1511 - RNA, 19 nt, Artificial Sequence
  Description of Artificial Sequence: Synthetic oligonucleotide
agagaagaagaccacgacu

SEQ ID NO: 1512 - RNA, 19 nt, Artificial Sequence
  Description of Artificial Sequence: Synthetic oligonucleotide
gagaagaagaccacgacug

SEQ ID NO: 1513 - RNA, 19 nt, Artificial Sequence
  Description of Artificial Sequence: Synthetic oligonucleotide
agaagaagaccacgacugg

SEQ ID NO: 1514 - RNA, 19 nt, Artificial Sequence
  Description of Artificial Sequence: Synthetic oligonucleotide
gaagaagaccacgacugga

SEQ ID NO: 1515 - RNA, 19 nt, Artificial Sequence
  Description of Artificial Sequence: Synthetic oligonucleotide
aagaagaccacgacuggag

SEQ ID NO: 1516 - RNA, 19 nt, Artificial Sequence
  Description of Artificial Sequence: Synthetic oligonucleotide
agaagaccacgacuggaga

SEQ ID NO: 1517 - RNA, 19 nt, Artificial Sequence
  Description of Artificial Sequence: Synthetic oligonucleotide
gaagaccacgacuggagaa

SEQ ID NO: 1518 - RNA, 19 nt, Artificial Sequence
  Description of Artificial Sequence: Synthetic oligonucleotide
aagaccacgacuggagaag

SEQ ID NO: 1519 - RNA, 19 nt, Artificial Sequence
  Description of Artificial Sequence: Synthetic oligonucleotide
agaccacgacuggagaagc

SEQ ID NO: 1520 - RNA, 19 nt, Artificial Sequence
  Description of Artificial Sequence: Synthetic oligonucleotide
gaccacgacuggagaagcc

SEQ ID NO: 1521 - RNA, 19 nt, Artificial Sequence
  Description of Artificial Sequence: Synthetic oligonucleotide
accacgacuggagaagccc

SEQ ID NO: 1522 - RNA, 19 nt, Artificial Sequence
  Description of Artificial Sequence: Synthetic oligonucleotide
ccacgacuggagaagcccc

SEQ ID NO: 1523 - RNA, 19 nt, Artificial Sequence
  Description of Artificial Sequence: Synthetic oligonucleotide
cacgacuggagaagccccc

SEQ ID NO: 1524 - RNA, 19 nt, Artificial Sequence
  Description of Artificial Sequence: Synthetic oligonucleotide
acgacuggagaagcccccu

SEQ ID NO: 1525 - RNA, 19 nt, Artificial Sequence
  Description of Artificial Sequence: Synthetic oligonucleotide
cgacuggagaagcccccuu

SEQ ID NO: 1526 - RNA, 19 nt, Artificial Sequence
  Description of Artificial Sequence: Synthetic oligonucleotide
gacuggagaagcccccuuu

SEQ ID NO: 1527 - RNA, 19 nt, Artificial Sequence
  Description of Artificial Sequence: Synthetic oligonucleotide
acuggagaagcccccuuuc

SEQ ID NO: 1528 - RNA, 19 nt, Artificial Sequence
  Description of Artificial Sequence: Synthetic oligonucleotide
cuggagaagcccccuuucu

SEQ ID NO: 1529 - RNA, 19 nt, Artificial Sequence
  Description of Artificial Sequence: Synthetic oligonucleotide
uggagaagcccccuuucug

SEQ ID NO: 1530 - RNA, 19 nt, Artificial Sequence
  Description of Artificial Sequence: Synthetic oligonucleotide
ggagaagcccccuuucuga

SEQ ID NO: 1531 - RNA, 19 nt, Artificial Sequence
  Description of Artificial Sequence: Synthetic oligonucleotide
gagaagcccccuuucugag

SEQ ID NO: 1532 - RNA, 19 nt, Artificial Sequence
  Description of Artificial Sequence: Synthetic oligonucleotide
agaagcccccuuucugagu

SEQ ID NO: 1533 - RNA, 19 nt, Artificial Sequence
  Description of Artificial Sequence: Synthetic oligonucleotide
gaagcccccuuucugagug

SEQ ID NO: 1534 - RNA, 19 nt, Artificial Sequence
  Description of Artificial Sequence: Synthetic oligonucleotide
aagcccccuuucugagugc

SEQ ID NO: 1535 - RNA, 19 nt, Artificial Sequence
  Description of Artificial Sequence: Synthetic oligonucleotide
agcccccuuucugagugca

SEQ ID NO: 1536 - RNA, 19 nt, Artificial Sequence
  Description of Artificial Sequence: Synthetic oligonucleotide
gcccccuuucugagugcag

SEQ ID NO: 1537 - RNA, 19 nt, Artificial Sequence
  Description of Artificial Sequence: Synthetic oligonucleotide
cccccuuucugagugcagg

SEQ ID NO: 1538 - RNA, 19 nt, Artificial Sequence
  Description of Artificial Sequence: Synthetic oligonucleotide
ccccuuucugagugcaggg

SEQ ID NO: 1539 - RNA, 19 nt, Artificial Sequence
  Description of Artificial Sequence: Synthetic oligonucleotide
cccuuucugagugcagggg

SEQ ID NO: 1540 - RNA, 19 nt, Artificial Sequence
  Description of Artificial Sequence: Synthetic oligonucleotide
ccuuucugagugcaggggg

SEQ ID NO: 1541 - RNA, 19 nt, Artificial Sequence
  Description of Artificial Sequence: Synthetic oligonucleotide
cuuucugagugcagggggg

SEQ ID NO: 1542 - RNA, 19 nt, Artificial Sequence
  Description of Artificial Sequence: Synthetic oligonucleotide
uuucugagugcaggggggc

SEQ ID NO: 1543 - RNA, 19 nt, Artificial Sequence
  Description of Artificial Sequence: Synthetic oligonucleotide
uucugagugcaggggggcu

SEQ ID NO: 1544 - RNA, 19 nt, Artificial Sequence
  Description of Artificial Sequence: Synthetic oligonucleotide
ucugagugcaggggggcug

SEQ ID NO: 1545 - RNA, 19 nt, Artificial Sequence
  Description of Artificial Sequence: Synthetic oligonucleotide
cugagugcaggggggcugc

SEQ ID NO: 1546 - RNA, 19 nt, Artificial Sequence
  Description of Artificial Sequence: Synthetic oligonucleotide
ugagugcaggggggcugca

SEQ ID NO: 1547 - RNA, 19 nt, Artificial Sequence
  Description of Artificial Sequence: Synthetic oligonucleotide
gagugcaggggggcugcau

SEQ ID NO: 1548 - RNA, 19 nt, Artificial Sequence
  Description of Artificial Sequence: Synthetic oligonucleotide
agugcaggggggcugcaug

SEQ ID NO: 1549 - RNA, 19 nt, Artificial Sequence
  Description of Artificial Sequence: Synthetic oligonucleotide
gugcaggggggcugcaugc

SEQ ID NO: 1550 - RNA, 19 nt, Artificial Sequence
  Description of Artificial Sequence: Synthetic oligonucleotide
ugcaggggggcugcaugcg

SEQ ID NO: 1551 - RNA, 19 nt, Artificial Sequence
  Description of Artificial Sequence: Synthetic oligonucleotide
gcaggggggcugcaugcgu

SEQ ID NO: 1552 - RNA, 19 nt, Artificial Sequence
  Description of Artificial Sequence: Synthetic oligonucleotide
caggggggcugcaugcguu

SEQ ID NO: 1553 - RNA, 19 nt, Artificial Sequence
  Description of Artificial Sequence: Synthetic oligonucleotide
aggggggcugcaugcguug

SEQ ID NO: 1554 - RNA, 19 nt, Artificial Sequence
  Description of Artificial Sequence: Synthetic oligonucleotide
ggggggcugcaugcguugc

SEQ ID NO: 1555 - RNA, 19 nt, Artificial Sequence
  Description of Artificial Sequence: Synthetic oligonucleotide
gggggcugcaugcguugcc

SEQ ID NO: 1556 - RNA, 19 nt, Artificial Sequence
  Description of Artificial Sequence: Synthetic oligonucleotide
ggggcugcaugcguugccu

SEQ ID NO: 1557 - RNA, 19 nt, Artificial Sequence
  Description of Artificial Sequence: Synthetic oligonucleotide
gggcugcaugcguugccuc

SEQ ID NO: 1558 - RNA, 19 nt, Artificial Sequence
  Description of Artificial Sequence: Synthetic oligonucleotide
ggcugcaugcguugccucc

SEQ ID NO: 1559 - RNA, 19 nt, Artificial Sequence
  Description of Artificial Sequence: Synthetic oligonucleotide
gcugcaugcguugccuccu

SEQ ID NO: 1560 - RNA, 19 nt, Artificial Sequence
  Description of Artificial Sequence: Synthetic oligonucleotide
cugcaugcguugccuccug

SEQ ID NO: 1561 - RNA, 19 nt, Artificial Sequence
  Description of Artificial Sequence: Synthetic oligonucleotide
ugcaugcguugccuccuga

SEQ ID NO: 1562 - RNA, 19 nt, Artificial Sequence
  Description of Artificial Sequence: Synthetic oligonucleotide
gcaugcguugccuccugag

SEQ ID NO: 1563 - RNA, 19 nt, Artificial Sequence
  Description of Artificial Sequence: Synthetic oligonucleotide
caugcguugccuccugaga

SEQ ID NO: 1564 - RNA, 19 nt, Artificial Sequence
  Description of Artificial Sequence: Synthetic oligonucleotide
augcguugccuccugagau

SEQ ID NO: 1565 - RNA, 19 nt, Artificial Sequence
  Description of Artificial Sequence: Synthetic oligonucleotide
ugcguugccuccugagauc

SEQ ID NO: 1566 - RNA, 19 nt, Artificial Sequence
  Description of Artificial Sequence: Synthetic oligonucleotide
gcguugccuccugagaucg

SEQ ID NO: 1567 - RNA, 19 nt, Artificial Sequence
  Description of Artificial Sequence: Synthetic oligonucleotide
cguugccuccugagaucga

SEQ ID NO: 1568 - RNA, 19 nt, Artificial Sequence
  Description of Artificial Sequence: Synthetic oligonucleotide
guugccuccugagaucgag

SEQ ID NO: 1569 - RNA, 19 nt, Artificial Sequence
  Description of Artificial Sequence: Synthetic oligonucleotide
uugccuccugagaucgagg

SEQ ID NO: 1570 - RNA, 19 nt, Artificial Sequence
  Description of Artificial Sequence: Synthetic oligonucleotide
ugccuccugagaucgaggc

SEQ ID NO: 1571 - RNA, 19 nt, Artificial Sequence
  Description of Artificial Sequence: Synthetic oligonucleotide
gccuccugagaucgaggcu

SEQ ID NO: 1572 - RNA, 19 nt, Artificial Sequence
  Description of Artificial Sequence: Synthetic oligonucleotide
ccuccugagaucgaggcug

SEQ ID NO: 1573 - RNA, 19 nt, Artificial Sequence
  Description of Artificial Sequence: Synthetic oligonucleotide
cuccugagaucgaggcugc

SEQ ID NO: 1574 - RNA, 19 nt, Artificial Sequence
  Description of Artificial Sequence: Synthetic oligonucleotide
uccugagaucgaggcugca

SEQ ID NO: 1575 - RNA, 19 nt, Artificial Sequence
  Description of Artificial Sequence: Synthetic oligonucleotide
ccugagaucgaggcugcag

SEQ ID NO: 1576 - RNA, 19 nt, Artificial Sequence
  Description of Artificial Sequence: Synthetic oligonucleotide
cugagaucgaggcugcagg

SEQ ID NO: 1577 - RNA, 19 nt, Artificial Sequence
  Description of Artificial Sequence: Synthetic oligonucleotide
ugagaucgaggcugcagga

SEQ ID NO: 1578 - RNA, 19 nt, Artificial Sequence
  Description of Artificial Sequence: Synthetic oligonucleotide
gagaucgaggcugcaggau

SEQ ID NO: 1579 - RNA, 19 nt, Artificial Sequence
  Description of Artificial Sequence: Synthetic oligonucleotide
agaucgaggcugcaggaua

SEQ ID NO: 1580 - RNA, 19 nt, Artificial Sequence
  Description of Artificial Sequence: Synthetic oligonucleotide
gaucgaggcugcaggauau

SEQ ID NO: 1581 - RNA, 19 nt, Artificial Sequence
  Description of Artificial Sequence: Synthetic oligonucleotide
aucgaggcugcaggauaug

SEQ ID NO: 1582 - RNA, 19 nt, Artificial Sequence
  Description of Artificial Sequence: Synthetic oligonucleotide
ucgaggcugcaggauaugc

SEQ ID NO: 1583 - RNA, 19 nt, Artificial Sequence
  Description of Artificial Sequence: Synthetic oligonucleotide
cgaggcugcaggauaugcu

SEQ ID NO: 1584 - RNA, 19 nt, Artificial Sequence
  Description of Artificial Sequence: Synthetic oligonucleotide
gaggcugcaggauaugcuc

SEQ ID NO: 1585 - RNA, 19 nt, Artificial Sequence
  Description of Artificial Sequence: Synthetic oligonucleotide
aggcugcaggauaugcuca

SEQ ID NO: 1586 - RNA, 19 nt, Artificial Sequence
  Description of Artificial Sequence: Synthetic oligonucleotide
ggcugcaggauaugcucag

SEQ ID NO: 1587 - RNA, 19 nt, Artificial Sequence
  Description of Artificial Sequence: Synthetic oligonucleotide
gcugcaggauaugcucaga

SEQ ID NO: 1588 - RNA, 19 nt, Artificial Sequence
  Description of Artificial Sequence: Synthetic oligonucleotide
cugcaggauaugcucagac

SEQ ID NO: 1589 - RNA, 19 nt, Artificial Sequence
  Description of Artificial Sequence: Synthetic oligonucleotide
ugcaggauaugcucagacu

SEQ ID NO: 1590 - RNA, 19 nt, Artificial Sequence
  Description of Artificial Sequence: Synthetic oligonucleotide
gcaggauaugcucagacuc

SEQ ID NO: 1591 - RNA, 19 nt, Artificial Sequence
  Description of Artificial Sequence: Synthetic oligonucleotide
caggauaugcucagacucu

SEQ ID NO: 1592 - RNA, 19 nt, Artificial Sequence
  Description of Artificial Sequence: Synthetic oligonucleotide
aggauaugcucagacucua

SEQ ID NO: 1593 - RNA, 19 nt, Artificial Sequence
  Description of Artificial Sequence: Synthetic oligonucleotide
ggauaugcucagacucuag

SEQ ID NO: 1594 - RNA, 19 nt, Artificial Sequence
  Description of Artificial Sequence: Synthetic oligonucleotide
gauaugcucagacucuaga

SEQ ID NO: 1595 - RNA, 19 nt, Artificial Sequence
  Description of Artificial Sequence: Synthetic oligonucleotide
auaugcucagacucuagag

SEQ ID NO: 1596 - RNA, 19 nt, Artificial Sequence
  Description of Artificial Sequence: Synthetic oligonucleotide
uaugcucagacucuagagg

SEQ ID NO: 1597 - RNA, 19 nt, Artificial Sequence
  Description of Artificial Sequence: Synthetic oligonucleotide
augcucagacucuagaggc

SEQ ID NO: 1598 - RNA, 19 nt, Artificial Sequence
  Description of Artificial Sequence: Synthetic oligonucleotide
ugcucagacucuagaggcg

SEQ ID NO: 1599 - RNA, 19 nt, Artificial Sequence
  Description of Artificial Sequence: Synthetic oligonucleotide
gcucagacucuagaggcgu

SEQ ID NO: 1600 - RNA, 19 nt, Artificial Sequence
  Description of Artificial Sequence: Synthetic oligonucleotide
cucagacucuagaggcgug

SEQ ID NO: 1601 - RNA, 19 nt, Artificial Sequence
  Description of Artificial Sequence: Synthetic oligonucleotide
ucagacucuagaggcgugg

SEQ ID NO: 1602 - RNA, 19 nt, Artificial Sequence
  Description of Artificial Sequence: Synthetic oligonucleotide
cagacucuagaggcgugga

SEQ ID NO: 1603 - RNA, 19 nt, Artificial Sequence
  Description of Artificial Sequence: Synthetic oligonucleotide
agacucuagaggcguggac

SEQ ID NO: 1604 - RNA, 19 nt, Artificial Sequence
  Description of Artificial Sequence: Synthetic oligonucleotide
gacucuagaggcguggacc

SEQ ID NO: 1605 - RNA, 19 nt, Artificial Sequence
  Description of Artificial Sequence: Synthetic oligonucleotide
acucuagaggcguggacca

SEQ ID NO: 1606 - RNA, 19 nt, Artificial Sequence
  Description of Artificial Sequence: Synthetic oligonucleotide
cucuagaggcguggaccaa

SEQ ID NO: 1607 - RNA, 19 nt, Artificial Sequence
  Description of Artificial Sequence: Synthetic oligonucleotide
ucuagaggcguggaccaag

SEQ ID NO: 1608 - RNA, 19 nt, Artificial Sequence
  Description of Artificial Sequence: Synthetic oligonucleotide
cuagaggcguggaccaagg

SEQ ID NO: 1609 - RNA, 19 nt, Artificial Sequence
  Description of Artificial Sequence: Synthetic oligonucleotide
uagaggcguggaccaaggg

SEQ ID NO: 1610 - RNA, 19 nt, Artificial Sequence
  Description of Artificial Sequence: Synthetic oligonucleotide
agaggcguggaccaagggg

SEQ ID NO: 1611 - RNA, 19 nt, Artificial Sequence
  Description of Artificial Sequence: Synthetic oligonucleotide
gaggcguggaccaaggggc

SEQ ID NO: 1612 - RNA, 19 nt, Artificial Sequence
  Description of Artificial Sequence: Synthetic oligonucleotide
aggcguggaccaaggggca

SEQ ID NO: 1613 - RNA, 19 nt, Artificial Sequence
  Description of Artificial Sequence: Synthetic oligonucleotide
ggcguggaccaaggggcau

SEQ ID NO: 1614 - RNA, 19 nt, Artificial Sequence
  Description of Artificial Sequence: Synthetic oligonucleotide
gcguggaccaaggggcaug

SEQ ID NO: 1615 - RNA, 19 nt, Artificial Sequence
  Description of Artificial Sequence: Synthetic oligonucleotide
cguggaccaaggggcaugg

SEQ ID NO: 1616 - RNA, 19 nt, Artificial Sequence
  Description of Artificial Sequence: Synthetic oligonucleotide
guggaccaaggggcaugga

SEQ ID NO: 1617 - RNA, 19 nt, Artificial Sequence
  Description of Artificial Sequence: Synthetic oligonucleotide
uggaccaaggggcauggag

SEQ ID NO: 1618 - RNA, 19 nt, Artificial Sequence
  Description of Artificial Sequence: Synthetic oligonucleotide
ggaccaaggggcauggagc

SEQ ID NO: 1619 - RNA, 19 nt, Artificial Sequence
  Description of Artificial Sequence: Synthetic oligonucleotide
gaccaaggggcauggagcu

SEQ ID NO: 1620 - RNA, 19 nt, Artificial Sequence
  Description of Artificial Sequence: Synthetic oligonucleotide
accaaggggcauggagcuu

SEQ ID NO: 1621 - RNA, 19 nt, Artificial Sequence
  Description of Artificial Sequence: Synthetic oligonucleotide
ccaaggggcauggagcuuc

SEQ ID NO: 1622 - RNA, 19 nt, Artificial Sequence
  Description of Artificial Sequence: Synthetic oligonucleotide
caaggggcauggagcuuca

SEQ ID NO: 1623 - RNA, 19 nt, Artificial Sequence
  Description of Artificial Sequence: Synthetic oligonucleotide
aaggggcauggagcuucac

SEQ ID NO: 1624 - RNA, 19 nt, Artificial Sequence
  Description of Artificial Sequence: Synthetic oligonucleotide
aggggcauggagcuucacu

SEQ ID NO: 1625 - RNA, 19 nt, Artificial Sequence
  Description of Artificial Sequence: Synthetic oligonucleotide
ggggcauggagcuucacuc

SEQ ID NO: 1626 - RNA, 19 nt, Artificial Sequence
  Description of Artificial Sequence: Synthetic oligonucleotide
gggcauggagcuucacucc

SEQ ID NO: 1627 - RNA, 19 nt, Artificial Sequence
  Description of Artificial Sequence: Synthetic oligonucleotide
ggcauggagcuucacuccu

SEQ ID NO: 1628 - RNA, 19 nt, Artificial Sequence
  Description of Artificial Sequence: Synthetic oligonucleotide
gcauggagcuucacuccuu

SEQ ID NO: 1629 - RNA, 19 nt, Artificial Sequence
  Description of Artificial Sequence: Synthetic oligonucleotide
cauggagcuucacuccuug

SEQ ID NO: 1630 - RNA, 19 nt, Artificial Sequence
  Description of Artificial Sequence: Synthetic oligonucleotide
auggagcuucacuccuugc

SEQ ID NO: 1631 - RNA, 19 nt, Artificial Sequence
  Description of Artificial Sequence: Synthetic oligonucleotide
uggagcuucacuccuugcu

SEQ ID NO: 1632 - RNA, 19 nt, Artificial Sequence
  Description of Artificial Sequence: Synthetic oligonucleotide
ggagcuucacuccuugcug

SEQ ID NO: 1633 - RNA, 19 nt, Artificial Sequence
  Description of Artificial Sequence: Synthetic oligonucleotide
gagcuucacuccuugcugg

SEQ ID NO: 1634 - RNA, 19 nt, Artificial Sequence
  Description of Artificial Sequence: Synthetic oligonucleotide
agcuucacuccuugcuggc

SEQ ID NO: 1635 - RNA, 19 nt, Artificial Sequence
  Description of Artificial Sequence: Synthetic oligonucleotide
gcuucacuccuugcuggcc

SEQ ID NO: 1636 - RNA, 19 nt, Artificial Sequence
  Description of Artificial Sequence: Synthetic oligonucleotide
cuucacuccuugcuggcca

SEQ ID NO: 1637 - RNA, 19 nt, Artificial Sequence
  Description of Artificial Sequence: Synthetic oligonucleotide
uucacuccuugcuggccag

SEQ ID NO: 1638 - RNA, 19 nt, Artificial Sequence
  Description of Artificial Sequence: Synthetic oligonucleotide
ucacuccuugcuggccagg

SEQ ID NO: 1639 - RNA, 19 nt, Artificial Sequence
  Description of Artificial Sequence: Synthetic oligonucleotide
cacuccuugcuggccaggg

SEQ ID NO: 1640 - RNA, 19 nt, Artificial Sequence
  Description of Artificial Sequence: Synthetic oligonucleotide
acuccuugcuggccaggga

SEQ ID NO: 1641 - RNA, 19 nt, Artificial Sequence
  Description of Artificial Sequence: Synthetic oligonucleotide
cuccuugcuggccagggag

SEQ ID NO: 1642 - RNA, 19 nt, Artificial Sequence
  Description of Artificial Sequence: Synthetic oligonucleotide
uccuugcuggccagggagu

SEQ ID NO: 1643 - RNA, 19 nt, Artificial Sequence
  Description of Artificial Sequence: Synthetic oligonucleotide
ccuugcuggccagggaguu

SEQ ID NO: 1644 - RNA, 19 nt, Artificial Sequence
  Description of Artificial Sequence: Synthetic oligonucleotide
cuugcuggccagggaguug

SEQ ID NO: 1645 - RNA, 19 nt, Artificial Sequence
  Description of Artificial Sequence: Synthetic oligonucleotide
uugcuggccagggaguugg

SEQ ID NO: 1646 - RNA, 19 nt, Artificial Sequence
  Description of Artificial Sequence: Synthetic oligonucleotide
ugcuggccagggaguuggg

SEQ ID NO: 1647 - RNA, 19 nt, Artificial Sequence
  Description of Artificial Sequence: Synthetic oligonucleotide
gcuggccagggaguugggg

SEQ ID NO: 1648 - RNA, 19 nt, Artificial Sequence
  Description of Artificial Sequence: Synthetic oligonucleotide
cuggccagggaguugggga

SEQ ID NO: 1649 - RNA, 19 nt, Artificial Sequence
  Description of Artificial Sequence: Synthetic oligonucleotide
uggccagggaguuggggac

SEQ ID NO: 1650 - RNA, 19 nt, Artificial Sequence
  Description of Artificial Sequence: Synthetic oligonucleotide
ggccagggaguuggggacu

SEQ ID NO: 1651 - RNA, 19 nt, Artificial Sequence
  Description of Artificial Sequence: Synthetic oligonucleotide
gccagggaguuggggacuc

SEQ ID NO: 1652 - RNA, 19 nt, Artificial Sequence
  Description of Artificial Sequence: Synthetic oligonucleotide
ccagggaguuggggacuca

SEQ ID NO: 1653 - RNA, 19 nt, Artificial Sequence
  Description of Artificial Sequence: Synthetic oligonucleotide
cagggaguuggggacucag

SEQ ID NO: 1654 - RNA, 19 nt, Artificial Sequence
  Description of Artificial Sequence: Synthetic oligonucleotide
agggaguuggggacucaga

SEQ ID NO: 1655 - RNA, 19 nt, Artificial Sequence
  Description of Artificial Sequence: Synthetic oligonucleotide
gggaguuggggacucagag

SEQ ID NO: 1656 - RNA, 19 nt, Artificial Sequence
  Description of Artificial Sequence: Synthetic oligonucleotide
ggaguuggggacucagagg

SEQ ID NO: 1657 - RNA, 19 nt, Artificial Sequence
  Description of Artificial Sequence: Synthetic oligonucleotide
gaguuggggacucagaggg

SEQ ID NO: 1658 - RNA, 19 nt, Artificial Sequence
  Description of Artificial Sequence: Synthetic oligonucleotide
aguuggggacucagaggga

SEQ ID NO: 1659 - RNA, 19 nt, Artificial Sequence
  Description of Artificial Sequence: Synthetic oligonucleotide
guuggggacucagagggac

SEQ ID NO: 1660 - RNA, 19 nt, Artificial Sequence
  Description of Artificial Sequence: Synthetic oligonucleotide
uuggggacucagagggacc

SEQ ID NO: 1661 - RNA, 19 nt, Artificial Sequence
  Description of Artificial Sequence: Synthetic oligonucleotide
uggggacucagagggacca

SEQ ID NO: 1662 - RNA, 19 nt, Artificial Sequence
  Description of Artificial Sequence: Synthetic oligonucleotide
ggggacucagagggaccac

SEQ ID NO: 1663 - RNA, 19 nt, Artificial Sequence
  Description of Artificial Sequence: Synthetic oligonucleotide
gggacucagagggaccacu

SEQ ID NO: 1664 - RNA, 19 nt, Artificial Sequence
  Description of Artificial Sequence: Synthetic oligonucleotide
ggacucagagggaccacuu

SEQ ID NO: 1665 - RNA, 19 nt, Artificial Sequence
  Description of Artificial Sequence: Synthetic oligonucleotide
gacucagagggaccacuug

SEQ ID NO: 1666 - RNA, 19 nt, Artificial Sequence
  Description of Artificial Sequence: Synthetic oligonucleotide
acucagagggaccacuugg

SEQ ID NO: 1667 - RNA, 19 nt, Artificial Sequence
  Description of Artificial Sequence: Synthetic oligonucleotide
cucagagggaccacuuggg

SEQ ID NO: 1668 - RNA, 19 nt, Artificial Sequence
  Description of Artificial Sequence: Synthetic oligonucleotide
ucagagggaccacuugggg

SEQ ID NO: 1669 - RNA, 19 nt, Artificial Sequence
  Description of Artificial Sequence: Synthetic oligonucleotide
cagagggaccacuuggggc

SEQ ID NO: 1670 - RNA, 19 nt, Artificial Sequence
  Description of Artificial Sequence: Synthetic oligonucleotide
agagggaccacuuggggcc

SEQ ID NO: 1671 - RNA, 19 nt, Artificial Sequence
  Description of Artificial Sequence: Synthetic oligonucleotide
gagggaccacuuggggcca

SEQ ID NO: 1672 - RNA, 19 nt, Artificial Sequence
  Description of Artificial Sequence: Synthetic oligonucleotide
agggaccacuuggggccag

SEQ ID NO: 1673 - RNA, 19 nt, Artificial Sequence
  Description of Artificial Sequence: Synthetic oligonucleotide
gggaccacuuggggccagc

SEQ ID NO: 1674 - RNA, 19 nt, Artificial Sequence
  Description of Artificial Sequence: Synthetic oligonucleotide
ggaccacuuggggccagcc

SEQ ID NO: 1675 - RNA, 19 nt, Artificial Sequence
  Description of Artificial Sequence: Synthetic oligonucleotide
gaccacuuggggccagcca

SEQ ID NO: 1676 - RNA, 19 nt, Artificial Sequence
  Description of Artificial Sequence: Synthetic oligonucleotide
accacuuggggccagccag

SEQ ID NO: 1677 - RNA, 19 nt, Artificial Sequence
  Description of Artificial Sequence: Synthetic oligonucleotide
ccacuuggggccagccaga

SEQ ID NO: 1678 - RNA, 19 nt, Artificial Sequence
  Description of Artificial Sequence: Synthetic oligonucleotide
cacuuggggccagccagac

SEQ ID NO: 1679 - RNA, 19 nt, Artificial Sequence
  Description of Artificial Sequence: Synthetic oligonucleotide
acuuggggccagccagacu

SEQ ID NO: 1680 - RNA, 19 nt, Artificial Sequence
  Description of Artificial Sequence: Synthetic oligonucleotide
cuuggggccagccagacug

SEQ ID NO: 1681 - RNA, 19 nt, Artificial Sequence
  Description of Artificial Sequence: Synthetic oligonucleotide
uuggggccagccagacugg

SEQ ID NO: 1682 - RNA, 19 nt, Artificial Sequence
  Description of Artificial Sequence: Synthetic oligonucleotide
uggggccagccagacuggc

SEQ ID NO: 1683 - RNA, 19 nt, Artificial Sequence
  Description of Artificial Sequence: Synthetic oligonucleotide
ggggccagccagacuggcc

SEQ ID NO: 1684 - RNA, 19 nt, Artificial Sequence
  Description of Artificial Sequence: Synthetic oligonucleotide
gggccagccagacuggccu

SEQ ID NO: 1685 - RNA, 19 nt, Artificial Sequence
  Description of Artificial Sequence: Synthetic oligonucleotide
ggccagccagacuggccuc

SEQ ID NO: 1686 - RNA, 19 nt, Artificial Sequence
  Description of Artificial Sequence: Synthetic oligonucleotide
gccagccagacuggccuca

SEQ ID NO: 1687 - RNA, 19 nt, Artificial Sequence
  Description of Artificial Sequence: Synthetic oligonucleotide
ccagccagacuggccucaa

SEQ ID NO: 1688 - RNA, 19 nt, Artificial Sequence
  Description of Artificial Sequence: Synthetic oligonucleotide
cagccagacuggccucaau

SEQ ID NO: 1689 - RNA, 19 nt, Artificial Sequence
  Description of Artificial Sequence: Synthetic oligonucleotide
agccagacuggccucaaug

SEQ ID NO: 1690 - RNA, 19 nt, Artificial Sequence
  Description of Artificial Sequence: Synthetic oligonucleotide
gccagacuggccucaaugg

SEQ ID NO: 1691 - RNA, 19 nt, Artificial Sequence
  Description of Artificial Sequence: Synthetic oligonucleotide
ccagacuggccucaauggc

SEQ ID NO: 1692 - RNA, 19 nt, Artificial Sequence
  Description of Artificial Sequence: Synthetic oligonucleotide
cagacuggccucaauggcg

SEQ ID NO: 1693 - RNA, 19 nt, Artificial Sequence
  Description of Artificial Sequence: Synthetic oligonucleotide
agacuggccucaauggcgg

SEQ ID NO: 1694 - RNA, 19 nt, Artificial Sequence
  Description of Artificial Sequence: Synthetic oligonucleotide
gacuggccucaauggcgga

SEQ ID NO: 1695 - RNA, 19 nt, Artificial Sequence
  Description of Artificial Sequence: Synthetic oligonucleotide
acuggccucaauggcggac

SEQ ID NO: 1696 - RNA, 19 nt, Artificial Sequence
  Description of Artificial Sequence: Synthetic oligonucleotide
cuggccucaauggcggacu

SEQ ID NO: 1697 - RNA, 19 nt, Artificial Sequence
  Description of Artificial Sequence: Synthetic oligonucleotide
uggccucaauggcggacuc

SEQ ID NO: 1698 - RNA, 19 nt, Artificial Sequence
  Description of Artificial Sequence: Synthetic oligonucleotide
ggccucaauggcggacuca

SEQ ID NO: 1699 - RNA, 19 nt, Artificial Sequence
  Description of Artificial Sequence: Synthetic oligonucleotide
gccucaauggcggacucag

SEQ ID NO: 1700 - RNA, 19 nt, Artificial Sequence
  Description of Artificial Sequence: Synthetic oligonucleotide
ccucaauggcggacucagu

SEQ ID NO: 1701 - RNA, 19 nt, Artificial Sequence
  Description of Artificial Sequence: Synthetic oligonucleotide
cucaauggcggacucaguc

SEQ ID NO: 1702 - RNA, 19 nt, Artificial Sequence
  Description of Artificial Sequence: Synthetic oligonucleotide
ucaauggcggacucaguca

SEQ ID NO: 1703 - RNA, 19 nt, Artificial Sequence
  Description of Artificial Sequence: Synthetic oligonucleotide
caauggcggacucagucac

SEQ ID NO: 1704 - RNA, 19 nt, Artificial Sequence
  Description of Artificial Sequence: Synthetic oligonucleotide
aauggcggacucagucaca

SEQ ID NO: 1705 - RNA, 19 nt, Artificial Sequence
  Description of Artificial Sequence: Synthetic oligonucleotide
auggcggacucagucacau

SEQ ID NO: 1706 - RNA, 19 nt, Artificial Sequence
  Description of Artificial Sequence: Synthetic oligonucleotide
uggcggacucagucacauu

SEQ ID NO: 1707 - RNA, 19 nt, Artificial Sequence
  Description of Artificial Sequence: Synthetic oligonucleotide
ggcggacucagucacauug

SEQ ID NO: 1708 - RNA, 19 nt, Artificial Sequence
  Description of Artificial Sequence: Synthetic oligonucleotide
gcggacucagucacauuga

SEQ ID NO: 1709 - RNA, 19 nt, Artificial Sequence
  Description of Artificial Sequence: Synthetic oligonucleotide
cggacucagucacauugac

SEQ ID NO: 1710 - RNA, 19 nt, Artificial Sequence
  Description of Artificial Sequence: Synthetic oligonucleotide
ggacucagucacauugacu

SEQ ID NO: 1711 - RNA, 19 nt, Artificial Sequence
  Description of Artificial Sequence: Synthetic oligonucleotide
gacucagucacauugacug

SEQ ID NO: 1712 - RNA, 19 nt, Artificial Sequence
  Description of Artificial Sequence: Synthetic oligonucleotide
acucagucacauugacuga

SEQ ID NO: 1713 - RNA, 19 nt, Artificial Sequence
  Description of Artificial Sequence: Synthetic oligonucleotide
cucagucacauugacugac

SEQ ID NO: 1714 - RNA, 19 nt, Artificial Sequence
  Description of Artificial Sequence: Synthetic oligonucleotide
ucagucacauugacugacg

SEQ ID NO: 1715 - RNA, 19 nt, Artificial Sequence
  Description of Artificial Sequence: Synthetic oligonucleotide
cagucacauugacugacgg

SEQ ID NO: 1716 - RNA, 19 nt, Artificial Sequence
  Description of Artificial Sequence: Synthetic oligonucleotide
agucacauugacugacggg

SEQ ID NO: 1717 - RNA, 19 nt, Artificial Sequence
  Description of Artificial Sequence: Synthetic oligonucleotide
gucacauugacugacgggg

SEQ ID NO: 1718 - RNA, 19 nt, Artificial Sequence
  Description of Artificial Sequence: Synthetic oligonucleotide
ucacauugacugacgggga

SEQ ID NO: 1719 - RNA, 19 nt, Artificial Sequence
  Description of Artificial Sequence: Synthetic oligonucleotide
cacauugacugacggggac

SEQ ID NO: 1720 - RNA, 19 nt, Artificial Sequence
  Description of Artificial Sequence: Synthetic oligonucleotide
acauugacugacggggacc

SEQ ID NO: 1721 - RNA, 19 nt, Artificial Sequence
  Description of Artificial Sequence: Synthetic oligonucleotide
cauugacugacggggacca

SEQ ID NO: 1722 - RNA, 19 nt, Artificial Sequence
  Description of Artificial Sequence: Synthetic oligonucleotide
auugacugacggggaccag

SEQ ID NO: 1723 - RNA, 19 nt, Artificial Sequence
  Description of Artificial Sequence: Synthetic oligonucleotide
uugacugacggggaccagg

SEQ ID NO: 1724 - RNA, 19 nt, Artificial Sequence
  Description of Artificial Sequence: Synthetic oligonucleotide
ugacugacggggaccaggg

SEQ ID NO: 1725 - RNA, 19 nt, Artificial Sequence
  Description of Artificial Sequence: Synthetic oligonucleotide
gacugacggggaccagggc

SEQ ID NO: 1726 - RNA, 19 nt, Artificial Sequence
  Description of Artificial Sequence: Synthetic oligonucleotide
acugacggggaccagggcu

SEQ ID NO: 1727 - RNA, 19 nt, Artificial Sequence
  Description of Artificial Sequence: Synthetic oligonucleotide
cugacggggaccagggcuu

SEQ ID NO: 1728 - RNA, 19 nt, Artificial Sequence
  Description of Artificial Sequence: Synthetic oligonucleotide
ugacggggaccagggcuug

SEQ ID NO: 1729 - RNA, 19 nt, Artificial Sequence
  Description of Artificial Sequence: Synthetic oligonucleotide
gacggggaccagggcuugu

SEQ ID NO: 1730 - RNA, 19 nt, Artificial Sequence
  Description of Artificial Sequence: Synthetic oligonucleotide
acggggaccagggcuugug

SEQ ID NO: 1731 - RNA, 19 nt, Artificial Sequence
  Description of Artificial Sequence: Synthetic oligonucleotide
cggggaccagggcuugugu

SEQ ID NO: 1732 - RNA, 19 nt, Artificial Sequence
  Description of Artificial Sequence: Synthetic oligonucleotide
ggggaccagggcuugugug

SEQ ID NO: 1733 - RNA, 19 nt, Artificial Sequence
  Description of Artificial Sequence: Synthetic oligonucleotide
gggaccagggcuugugugg

SEQ ID NO: 1734 - RNA, 19 nt, Artificial Sequence
  Description of Artificial Sequence: Synthetic oligonucleotide
ggaccagggcuuguguggg

SEQ ID NO: 1735 - RNA, 19 nt, Artificial Sequence
  Description of Artificial Sequence: Synthetic oligonucleotide
gaccagggcuugugugggu

SEQ ID NO: 1736 - RNA, 19 nt, Artificial Sequence
  Description of Artificial Sequence: Synthetic oligonucleotide
accagggcuuguguggguc

SEQ ID NO: 1737 - RNA, 19 nt, Artificial Sequence
  Description of Artificial Sequence: Synthetic oligonucleotide
ccagggcuugugugggucg

SEQ ID NO: 1738 - RNA, 19 nt, Artificial Sequence
  Description of Artificial Sequence: Synthetic oligonucleotide
cagggcuugugugggucga

SEQ ID NO: 1739 - RNA, 19 nt, Artificial Sequence
  Description of Artificial Sequence: Synthetic oligonucleotide
agggcuugugugggucgag

SEQ ID NO: 1740 - RNA, 19 nt, Artificial Sequence
  Description of Artificial Sequence: Synthetic oligonucleotide
gggcuugugugggucgaga

SEQ ID NO: 1741 - RNA, 19 nt, Artificial Sequence
  Description of Artificial Sequence: Synthetic oligonucleotide
ggcuugugugggucgagag

SEQ ID NO: 1742 - RNA, 19 nt, Artificial Sequence
  Description of Artificial Sequence: Synthetic oligonucleotide
gcuugugugggucgagagc

SEQ ID NO: 1743 - RNA, 19 nt, Artificial Sequence
  Description of Artificial Sequence: Synthetic oligonucleotide
cuugugugggucgagagcg

SEQ ID NO: 1744 - RNA, 19 nt, Artificial Sequence
  Description of Artificial Sequence: Synthetic oligonucleotide
uugugugggucgagagcgc

SEQ ID NO: 1745 - RNA, 19 nt, Artificial Sequence
  Description of Artificial Sequence: Synthetic oligonucleotide
ugugugggucgagagcgcc

SEQ ID NO: 1746 - RNA, 19 nt, Artificial Sequence
  Description of Artificial Sequence: Synthetic oligonucleotide
gugugggucgagagcgccc

SEQ ID NO: 1747 - RNA, 19 nt, Artificial Sequence
  Description of Artificial Sequence: Synthetic oligonucleotide
ugugggucgagagcgcccu

SEQ ID NO: 1748 - RNA, 19 nt, Artificial Sequence
  Description of Artificial Sequence: Synthetic oligonucleotide
gugggucgagagcgcccuc

SEQ ID NO: 1749 - RNA, 19 nt, Artificial Sequence
  Description of Artificial Sequence: Synthetic oligonucleotide
ugggucgagagcgcccuca

SEQ ID NO: 1750 - RNA, 19 nt, Artificial Sequence
  Description of Artificial Sequence: Synthetic oligonucleotide
gggucgagagcgcccucau

SEQ ID NO: 1751 - RNA, 19 nt, Artificial Sequence
  Description of Artificial Sequence: Synthetic oligonucleotide
ggucgagagcgcccucaug

SEQ ID NO: 1752 - RNA, 19 nt, Artificial Sequence
  Description of Artificial Sequence: Synthetic oligonucleotide
gucgagagcgcccucaugg

SEQ ID NO: 1753 - RNA, 19 nt, Artificial Sequence
  Description of Artificial Sequence: Synthetic oligonucleotide
ucgagagcgcccucauggu

SEQ ID NO: 1754 - RNA, 19 nt, Artificial Sequence
  Description of Artificial Sequence: Synthetic oligonucleotide
cgagagcgcccucauggug

SEQ ID NO: 1755 - RNA, 19 nt, Artificial Sequence
  Description of Artificial Sequence: Synthetic oligonucleotide
gagagcgcccucauggugc

SEQ ID NO: 1756 - RNA, 19 nt, Artificial Sequence
  Description of Artificial Sequence: Synthetic oligonucleotide
agagcgcccucauggugcu

SEQ ID NO: 1757 - RNA, 19 nt, Artificial Sequence
  Description of Artificial Sequence: Synthetic oligonucleotide
gagcgcccucauggugcug

SEQ ID NO: 1758 - RNA, 19 nt, Artificial Sequence
  Description of Artificial Sequence: Synthetic oligonucleotide
agcgcccucauggugcugg

SEQ ID NO: 1759 - RNA, 19 nt, Artificial Sequence
  Description of Artificial Sequence: Synthetic oligonucleotide
gcgcccucauggugcuggu

SEQ ID NO: 1760 - RNA, 19 nt, Artificial Sequence
  Description of Artificial Sequence: Synthetic oligonucleotide
cgcccucauggugcuggug

SEQ ID NO: 1761 - RNA, 19 nt, Artificial Sequence
  Description of Artificial Sequence: Synthetic oligonucleotide
gcccucauggugcuggugc

SEQ ID NO: 1762 - RNA, 19 nt, Artificial Sequence
  Description of Artificial Sequence: Synthetic oligonucleotide
cccucauggugcuggugcu

SEQ ID NO: 1763 - RNA, 19 nt, Artificial Sequence
  Description of Artificial Sequence: Synthetic oligonucleotide
ccucauggugcuggugcug

SEQ ID NO: 1764 - RNA, 19 nt, Artificial Sequence
  Description of Artificial Sequence: Synthetic oligonucleotide
cucauggugcuggugcugu

SEQ ID NO: 1765 - RNA, 19 nt, Artificial Sequence
  Description of Artificial Sequence: Synthetic oligonucleotide
ucauggugcuggugcuguu

SEQ ID NO: 1766 - RNA, 19 nt, Artificial Sequence
  Description of Artificial Sequence: Synthetic oligonucleotide
cauggugcuggugcuguug

SEQ ID NO: 1767 - RNA, 19 nt, Artificial Sequence
  Description of Artificial Sequence: Synthetic oligonucleotide
auggugcuggugcuguugu

SEQ ID NO: 1768 - RNA, 19 nt, Artificial Sequence
  Description of Artificial Sequence: Synthetic oligonucleotide
uggugcuggugcuguugug

SEQ ID NO: 1769 - RNA, 19 nt, Artificial Sequence
  Description of Artificial Sequence: Synthetic oligonucleotide
ggugcuggugcuguugugu

SEQ ID NO: 1770 - RNA, 19 nt, Artificial Sequence
  Description of Artificial Sequence: Synthetic oligonucleotide
gugcuggugcuguugugug

SEQ ID NO: 1771 - RNA, 19 nt, Artificial Sequence
  Description of Artificial Sequence: Synthetic oligonucleotide
ugcuggugcuguugugugu

SEQ ID NO: 1772 - RNA, 19 nt, Artificial Sequence
  Description of Artificial Sequence: Synthetic oligonucleotide
gcuggugcuguugugugua

SEQ ID NO: 1773 - RNA, 19 nt, Artificial Sequence
  Description of Artificial Sequence: Synthetic oligonucleotide
cuggugcuguuguguguag

SEQ ID NO: 1774 - RNA, 19 nt, Artificial Sequence
  Description of Artificial Sequence: Synthetic oligonucleotide
uggugcuguuguguguagg

SEQ ID NO: 1775 - RNA, 19 nt, Artificial Sequence
  Description of Artificial Sequence: Synthetic oligonucleotide
ggugcuguuguguguaggu

SEQ ID NO: 1776 - RNA, 19 nt, Artificial Sequence
  Description of Artificial Sequence: Synthetic oligonucleotide
gugcuguuguguguagguc

SEQ ID NO: 1777 - RNA, 19 nt, Artificial Sequence
  Description of Artificial Sequence: Synthetic oligonucleotide
ugcuguuguguguaggucc

SEQ ID NO: 1778 - RNA, 19 nt, Artificial Sequence
  Description of Artificial Sequence: Synthetic oligonucleotide
gcuguuguguguagguccc

SEQ ID NO: 1779 - RNA, 19 nt, Artificial Sequence
  Description of Artificial Sequence: Synthetic oligonucleotide
cuguuguguguaggucccc

SEQ ID NO: 1780 - RNA, 19 nt, Artificial Sequence
  Description of Artificial Sequence: Synthetic oligonucleotide
uguuguguguagguccccu

SEQ ID NO: 1781 - RNA, 19 nt, Artificial Sequence
  Description of Artificial Sequence: Synthetic oligonucleotide
guuguguguagguccccug

SEQ ID NO: 1782 - RNA, 19 nt, Artificial Sequence
  Description of Artificial Sequence: Synthetic oligonucleotide
uuguguguagguccccugg

SEQ ID NO: 1783 - RNA, 19 nt, Artificial Sequence
  Description of Artificial Sequence: Synthetic oligonucleotide
uguguguagguccccuggg

SEQ ID NO: 1784 - RNA, 19 nt, Artificial Sequence
  Description of Artificial Sequence: Synthetic oligonucleotide
guguguagguccccugggg

SEQ ID NO: 1785 - RNA, 19 nt, Artificial Sequence
  Description of Artificial Sequence: Synthetic oligonucleotide
uguguagguccccugggga

SEQ ID NO: 1786 - RNA, 19 nt, Artificial Sequence
  Description of Artificial Sequence: Synthetic oligonucleotide
guguagguccccuggggac

SEQ ID NO: 1787 - RNA, 19 nt, Artificial Sequence
  Description of Artificial Sequence: Synthetic oligonucleotide
uguagguccccuggggaca

SEQ ID NO: 1788 - RNA, 19 nt, Artificial Sequence
  Description of Artificial Sequence: Synthetic oligonucleotide
guagguccccuggggacac

SEQ ID NO: 1789 - RNA, 19 nt, Artificial Sequence
  Description of Artificial Sequence: Synthetic oligonucleotide
uagguccccuggggacaca

SEQ ID NO: 1790 - RNA, 19 nt, Artificial Sequence
  Description of Artificial Sequence: Synthetic oligonucleotide
agguccccuggggacacaa

SEQ ID NO: 1791 - RNA, 19 nt, Artificial Sequence
  Description of Artificial Sequence: Synthetic oligonucleotide
gguccccuggggacacaag

SEQ ID NO: 1792 - RNA, 19 nt, Artificial Sequence
  Description of Artificial Sequence: Synthetic oligonucleotide
guccccuggggacacaagc

SEQ ID NO: 1793 - RNA, 19 nt, Artificial Sequence
  Description of Artificial Sequence: Synthetic oligonucleotide
uccccuggggacacaagca

SEQ ID NO: 1794 - RNA, 19 nt, Artificial Sequence
  Description of Artificial Sequence: Synthetic oligonucleotide
ccccuggggacacaagcag

SEQ ID NO: 1795 - RNA, 19 nt, Artificial Sequence
  Description of Artificial Sequence: Synthetic oligonucleotide
cccuggggacacaagcagg

SEQ ID NO: 1796 - RNA, 19 nt, Artificial Sequence
  Description of Artificial Sequence: Synthetic oligonucleotide
ccuggggacacaagcaggc

SEQ ID NO: 1797 - RNA, 19 nt, Artificial Sequence
  Description of Artificial Sequence: Synthetic oligonucleotide
cuggggacacaagcaggcg

SEQ ID NO: 1798 - RNA, 19 nt, Artificial Sequence
  Description of Artificial Sequence: Synthetic oligonucleotide
uggggacacaagcaggcgc

SEQ ID NO: 1799 - RNA, 19 nt, Artificial Sequence
  Description of Artificial Sequence: Synthetic oligonucleotide
ggggacacaagcaggcgcc

SEQ ID NO: 1800 - RNA, 19 nt, Artificial Sequence
  Description of Artificial Sequence: Synthetic oligonucleotide
gggacacaagcaggcgcca

SEQ ID NO: 1801 - RNA, 19 nt, Artificial Sequence
  Description of Artificial Sequence: Synthetic oligonucleotide
ggacacaagcaggcgccaa

SEQ ID NO: 1802 - RNA, 19 nt, Artificial Sequence
  Description of Artificial Sequence: Synthetic oligonucleotide
gacacaagcaggcgccaau

SEQ ID NO: 1803 - RNA, 19 nt, Artificial Sequence
  Description of Artificial Sequence: Synthetic oligonucleotide
acacaagcaggcgccaaug

SEQ ID NO: 1804 - RNA, 19 nt, Artificial Sequence
  Description of Artificial Sequence: Synthetic oligonucleotide
cacaagcaggcgccaaugg

SEQ ID NO: 1805 - RNA, 19 nt, Artificial Sequence
  Description of Artificial Sequence: Synthetic oligonucleotide
acaagcaggcgccaauggu

SEQ ID NO: 1806 - RNA, 19 nt, Artificial Sequence
  Description of Artificial Sequence: Synthetic oligonucleotide
caagcaggcgccaauggua

SEQ ID NO: 1807 - RNA, 19 nt, Artificial Sequence
  Description of Artificial Sequence: Synthetic oligonucleotide
aagcaggcgccaaugguau

SEQ ID NO: 1808 - RNA, 19 nt, Artificial Sequence
  Description of Artificial Sequence: Synthetic oligonucleotide
agcaggcgccaaugguauc

SEQ ID NO: 1809 - RNA, 19 nt, Artificial Sequence
  Description of Artificial Sequence: Synthetic oligonucleotide
gcaggcgccaaugguaucu

SEQ ID NO: 1810 - RNA, 19 nt, Artificial Sequence
  Description of Artificial Sequence: Synthetic oligonucleotide
caggcgccaaugguaucug

SEQ ID NO: 1811 - RNA, 19 nt, Artificial Sequence
  Description of Artificial Sequence: Synthetic oligonucleotide
aggcgccaaugguaucugg

SEQ ID NO: 1812 - RNA, 19 nt, Artificial Sequence
  Description of Artificial Sequence: Synthetic oligonucleotide
ggcgccaaugguaucuggg

SEQ ID NO: 1813 - RNA, 19 nt, Artificial Sequence
  Description of Artificial Sequence: Synthetic oligonucleotide
gcgccaaugguaucugggc

SEQ ID NO: 1814 - RNA, 19 nt, Artificial Sequence
  Description of Artificial Sequence: Synthetic oligonucleotide
cgccaaugguaucugggcg

SEQ ID NO: 1815 - RNA, 19 nt, Artificial Sequence
  Description of Artificial Sequence: Synthetic oligonucleotide
gccaaugguaucugggcgg

SEQ ID NO: 1816 - RNA, 19 nt, Artificial Sequence
  Description of Artificial Sequence: Synthetic oligonucleotide
ccaaugguaucugggcgga

SEQ ID NO: 1817 - RNA, 19 nt, Artificial Sequence
  Description of Artificial Sequence: Synthetic oligonucleotide
caaugguaucugggcggag

SEQ ID NO: 1818 - RNA, 19 nt, Artificial Sequence
  Description of Artificial Sequence: Synthetic oligonucleotide
aaugguaucugggcggagc

SEQ ID NO: 1819 - RNA, 19 nt, Artificial Sequence
  Description of Artificial Sequence: Synthetic oligonucleotide
augguaucugggcggagcu

SEQ ID NO: 1820 - RNA, 19 nt, Artificial Sequence
  Description of Artificial Sequence: Synthetic oligonucleotide
ugguaucugggcggagcuc

SEQ ID NO: 1821 - RNA, 19 nt, Artificial Sequence
  Description of Artificial Sequence: Synthetic oligonucleotide
gguaucugggcggagcuca

SEQ ID NO: 1822 - RNA, 19 nt, Artificial Sequence
  Description of Artificial Sequence: Synthetic oligonucleotide
guaucugggcggagcucac

SEQ ID NO: 1823 - RNA, 19 nt, Artificial Sequence
  Description of Artificial Sequence: Synthetic oligonucleotide
uaucugggcggagcucaca

SEQ ID NO: 1824 - RNA, 19 nt, Artificial Sequence
  Description of Artificial Sequence: Synthetic oligonucleotide
aucugggcggagcucacag

SEQ ID NO: 1825 - RNA, 19 nt, Artificial Sequence
  Description of Artificial Sequence: Synthetic oligonucleotide
ucugggcggagcucacaga

SEQ ID NO: 1826 - RNA, 19 nt, Artificial Sequence
  Description of Artificial Sequence: Synthetic oligonucleotide
cugggcggagcucacagag

SEQ ID NO: 1827 - RNA, 19 nt, Artificial Sequence
  Description of Artificial Sequence: Synthetic oligonucleotide
ugggcggagcucacagagu

SEQ ID NO: 1828 - RNA, 19 nt, Artificial Sequence
  Description of Artificial Sequence: Synthetic oligonucleotide
gggcggagcucacagaguu

SEQ ID NO: 1829 - RNA, 19 nt, Artificial Sequence
  Description of Artificial Sequence: Synthetic oligonucleotide
ggcggagcucacagaguuc

SEQ ID NO: 1830 - RNA, 19 nt, Artificial Sequence
  Description of Artificial Sequence: Synthetic oligonucleotide
gcggagcucacagaguucu

SEQ ID NO: 1831 - RNA, 19 nt, Artificial Sequence
  Description of Artificial Sequence: Synthetic oligonucleotide
cggagcucacagaguucuu

SEQ ID NO: 1832 - RNA, 19 nt, Artificial Sequence
  Description of Artificial Sequence: Synthetic oligonucleotide
ggagcucacagaguucuug

SEQ ID NO: 1833 - RNA, 19 nt, Artificial Sequence
  Description of Artificial Sequence: Synthetic oligonucleotide
gagcucacagaguucuugg

SEQ ID NO: 1834 - RNA, 19 nt, Artificial Sequence
  Description of Artificial Sequence: Synthetic oligonucleotide
agcucacagaguucuugga

SEQ ID NO: 1835 - RNA, 19 nt, Artificial Sequence
  Description of Artificial Sequence: Synthetic oligonucleotide
gcucacagaguucuuggaa

SEQ ID NO: 1836 - RNA, 19 nt, Artificial Sequence
  Description of Artificial Sequence: Synthetic oligonucleotide
cucacagaguucuuggaau

SEQ ID NO: 1837 - RNA, 19 nt, Artificial Sequence
  Description of Artificial Sequence: Synthetic oligonucleotide
ucacagaguucuuggaaua

SEQ ID NO: 1838 - RNA, 19 nt, Artificial Sequence
  Description of Artificial Sequence: Synthetic oligonucleotide
cacagaguucuuggaauaa

SEQ ID NO: 1839 - RNA, 19 nt, Artificial Sequence
  Description of Artificial Sequence: Synthetic oligonucleotide
acagaguucuuggaauaaa

SEQ ID NO: 1840 - RNA, 19 nt, Artificial Sequence
  Description of Artificial Sequence: Synthetic oligonucleotide
cagaguucuuggaauaaaa

SEQ ID NO: 1841 - RNA, 19 nt, Artificial Sequence
  Description of Artificial Sequence: Synthetic oligonucleotide
agaguucuuggaauaaaag

SEQ ID NO: 1842 - RNA, 19 nt, Artificial Sequence
  Description of Artificial Sequence: Synthetic oligonucleotide
gaguucuuggaauaaaagc

SEQ ID NO: 1843 - RNA, 19 nt, Artificial Sequence
  Description of Artificial Sequence: Synthetic oligonucleotide
aguucuuggaauaaaagca

SEQ ID NO: 1844 - RNA, 19 nt, Artificial Sequence
  Description of Artificial Sequence: Synthetic oligonucleotide
guucuuggaauaaaagcaa

SEQ ID NO: 1845 - RNA, 19 nt, Artificial Sequence
  Description of Artificial Sequence: Synthetic oligonucleotide
uucuuggaauaaaagcaac

SEQ ID NO: 1846 - RNA, 19 nt, Artificial Sequence
  Description of Artificial Sequence: Synthetic oligonucleotide
ucuuggaauaaaagcaacc

SEQ ID NO: 1847 - RNA, 19 nt, Artificial Sequence
  Description of Artificial Sequence: Synthetic oligonucleotide
cuuggaauaaaagcaaccu

SEQ ID NO: 1848 - RNA, 19 nt, Artificial Sequence
  Description of Artificial Sequence: Synthetic oligonucleotide
uuggaauaaaagcaaccuc

SEQ ID NO: 1849 - RNA, 19 nt, Artificial Sequence
  Description of Artificial Sequence: Synthetic oligonucleotide
uggaauaaaagcaaccuca

SEQ ID NO: 1850 - RNA, 19 nt, Artificial Sequence
  Description of Artificial Sequence: Synthetic oligonucleotide
ggaauaaaagcaaccucag

SEQ ID NO: 1851 - RNA, 19 nt, Artificial Sequence
  Description of Artificial Sequence: Synthetic oligonucleotide
gaauaaaagcaaccucaga

SEQ ID NO: 1852 - RNA, 19 nt, Artificial Sequence
  Description of Artificial Sequence: Synthetic oligonucleotide
aauaaaagcaaccucagaa

SEQ ID NO: 1853 - RNA, 19 nt, Artificial Sequence
  Description of Artificial Sequence: Synthetic oligonucleotide
auaaaagcaaccucagaac

SEQ ID NO: 1854 - RNA, 19 nt, Artificial Sequence
  Description of Artificial Sequence: Synthetic oligonucleotide
uaaaagcaaccucagaaca

SEQ ID NO: 1855 - RNA, 19 nt, Artificial Sequence
  Description of Artificial Sequence: Synthetic oligonucleotide
uccgcucagcucggcuucu

SEQ ID NO: 1856 - RNA, 19 nt, Artificial Sequence
  Description of Artificial Sequence: Synthetic oligonucleotide
auccgcucagcucggcuuc

SEQ ID NO: 1857 - RNA, 19 nt, Artificial Sequence
  Description of Artificial Sequence: Synthetic oligonucleotide
gauccgcucagcucggcuu

SEQ ID NO: 1858 - RNA, 19 nt, Artificial Sequence
  Description of Artificial Sequence: Synthetic oligonucleotide
ggauccgcucagcucggcu

SEQ ID NO: 1859 - RNA, 19 nt, Artificial Sequence
  Description of Artificial Sequence: Synthetic oligonucleotide
aggauccgcucagcucggc

SEQ ID NO: 1860 - RNA, 19 nt, Artificial Sequence
  Description of Artificial Sequence: Synthetic oligonucleotide
gaggauccgcucagcucgg

SEQ ID NO: 1861 - RNA, 19 nt, Artificial Sequence
  Description of Artificial Sequence: Synthetic oligonucleotide
ugaggauccgcucagcucg

SEQ ID NO: 1862 - RNA, 19 nt, Artificial Sequence
  Description of Artificial Sequence: Synthetic oligonucleotide
gugaggauccgcucagcuc

SEQ ID NO: 1863 - RNA, 19 nt, Artificial Sequence
  Description of Artificial Sequence: Synthetic oligonucleotide
ugugaggauccgcucagcu

SEQ ID NO: 1864 - RNA, 19 nt, Artificial Sequence
  Description of Artificial Sequence: Synthetic oligonucleotide
gugugaggauccgcucagc

SEQ ID NO: 1865 - RNA, 19 nt, Artificial Sequence
  Description of Artificial Sequence: Synthetic oligonucleotide
cgugugaggauccgcucag

SEQ ID NO: 1866 - RNA, 19 nt, Artificial Sequence
  Description of Artificial Sequence: Synthetic oligonucleotide
ucgugugaggauccgcuca

SEQ ID NO: 1867 - RNA, 19 nt, Artificial Sequence
  Description of Artificial Sequence: Synthetic oligonucleotide
gucgugugaggauccgcuc

SEQ ID NO: 1868 - RNA, 19 nt, Artificial Sequence
  Description of Artificial Sequence: Synthetic oligonucleotide
agucgugugaggauccgcu

SEQ ID NO: 1869 - RNA, 19 nt, Artificial Sequence
  Description of Artificial Sequence: Synthetic oligonucleotide
cagucgugugaggauccgc

SEQ ID NO: 1870 - RNA, 19 nt, Artificial Sequence
  Description of Artificial Sequence: Synthetic oligonucleotide
acagucgugugaggauccg

SEQ ID NO: 1871 - RNA, 19 nt, Artificial Sequence
  Description of Artificial Sequence: Synthetic oligonucleotide
cacagucgugugaggaucc

SEQ ID NO: 1872 - RNA, 19 nt, Artificial Sequence
  Description of Artificial Sequence: Synthetic oligonucleotide
ucacagucgugugaggauc

SEQ ID NO: 1873 - RNA, 19 nt, Artificial Sequence
  Description of Artificial Sequence: Synthetic oligonucleotide
aucacagucgugugaggau

SEQ ID NO: 1874 - RNA, 19 nt, Artificial Sequence
  Description of Artificial Sequence: Synthetic oligonucleotide
gaucacagucgugugagga

SEQ ID NO: 1875 - RNA, 19 nt, Artificial Sequence
  Description of Artificial Sequence: Synthetic oligonucleotide
ggaucacagucgugugagg

SEQ ID NO: 1876 - RNA, 19 nt, Artificial Sequence
  Description of Artificial Sequence: Synthetic oligonucleotide
cggaucacagucgugugag

SEQ ID NO: 1877 - RNA, 19 nt, Artificial Sequence
  Description of Artificial Sequence: Synthetic oligonucleotide
ucggaucacagucguguga

SEQ ID NO: 1878 - RNA, 19 nt, Artificial Sequence
  Description of Artificial Sequence: Synthetic oligonucleotide
aucggaucacagucgugug

SEQ ID NO: 1879 - RNA, 19 nt, Artificial Sequence
  Description of Artificial Sequence: Synthetic oligonucleotide
aaucggaucacagucgugu

SEQ ID NO: 1880 - RNA, 19 nt, Artificial Sequence
  Description of Artificial Sequence: Synthetic oligonucleotide
gaaucggaucacagucgug

SEQ ID NO: 1881 - RNA, 19 nt, Artificial Sequence
  Description of Artificial Sequence: Synthetic oligonucleotide
agaaucggaucacagucgu

SEQ ID NO: 1882 - RNA, 19 nt, Artificial Sequence
  Description of Artificial Sequence: Synthetic oligonucleotide
aagaaucggaucacagucg

SEQ ID NO: 1883 - RNA, 19 nt, Artificial Sequence
  Description of Artificial Sequence: Synthetic oligonucleotide
aaagaaucggaucacaguc

SEQ ID NO: 1884 - RNA, 19 nt, Artificial Sequence
  Description of Artificial Sequence: Synthetic oligonucleotide
gaaagaaucggaucacagu

SEQ ID NO: 1885 - RNA, 19 nt, Artificial Sequence
  Description of Artificial Sequence: Synthetic oligonucleotide
ggaaagaaucggaucacag

SEQ ID NO: 1886 - RNA, 19 nt, Artificial Sequence
  Description of Artificial Sequence: Synthetic oligonucleotide
uggaaagaaucggaucaca

SEQ ID NO: 1887 - RNA, 19 nt, Artificial Sequence
  Description of Artificial Sequence: Synthetic oligonucleotide
cuggaaagaaucggaucac

SEQ ID NO: 1888 - RNA, 19 nt, Artificial Sequence
  Description of Artificial Sequence: Synthetic oligonucleotide
gcuggaaagaaucggauca

SEQ ID NO: 1889 - RNA, 19 nt, Artificial Sequence
  Description of Artificial Sequence: Synthetic oligonucleotide
cgcuggaaagaaucggauc

SEQ ID NO: 1890 - RNA, 19 nt, Artificial Sequence
  Description of Artificial Sequence: Synthetic oligonucleotide
ccgcuggaaagaaucggau

SEQ ID NO: 1891 - RNA, 19 nt, Artificial Sequence
  Description of Artificial Sequence: Synthetic oligonucleotide
gccgcuggaaagaaucgga

SEQ ID NO: 1892 - RNA, 19 nt, Artificial Sequence
  Description of Artificial Sequence: Synthetic oligonucleotide
agccgcuggaaagaaucgg

SEQ ID NO: 1893 - RNA, 19 nt, Artificial Sequence
  Description of Artificial Sequence: Synthetic oligonucleotide
aagccgcuggaaagaaucg

SEQ ID NO: 1894 - RNA, 19 nt, Artificial Sequence
  Description of Artificial Sequence: Synthetic oligonucleotide
gaagccgcuggaaagaauc

SEQ ID NO: 1895 - RNA, 19 nt, Artificial Sequence
  Description of Artificial Sequence: Synthetic oligonucleotide
agaagccgcuggaaagaau

SEQ ID NO: 1896 - RNA, 19 nt, Artificial Sequence
  Description of Artificial Sequence: Synthetic oligonucleotide
cagaagccgcuggaaagaa

SEQ ID NO: 1897 - RNA, 19 nt, Artificial Sequence
  Description of Artificial Sequence: Synthetic oligonucleotide
gcagaagccgcuggaaaga

SEQ ID NO: 1898 - RNA, 19 nt, Artificial Sequence
  Description of Artificial Sequence: Synthetic oligonucleotide
ugcagaagccgcuggaaag

SEQ ID NO: 1899 - RNA, 19 nt, Artificial Sequence
  Description of Artificial Sequence: Synthetic oligonucleotide
uugcagaagccgcuggaaa

SEQ ID NO: 1900 - RNA, 19 nt, Artificial Sequence
  Description of Artificial Sequence: Synthetic oligonucleotide
guugcagaagccgcuggaa

SEQ ID NO: 1901 - RNA, 19 nt, Artificial Sequence
  Description of Artificial Sequence: Synthetic oligonucleotide
gguugcagaagccgcugga

SEQ ID NO: 1902 - RNA, 19 nt, Artificial Sequence
  Description of Artificial Sequence: Synthetic oligonucleotide
ugguugcagaagccgcugg

SEQ ID NO: 1903 - RNA, 19 nt, Artificial Sequence
  Description of Artificial Sequence: Synthetic oligonucleotide
uugguugcagaagccgcug

SEQ ID NO: 1904 - RNA, 19 nt, Artificial Sequence
  Description of Artificial Sequence: Synthetic oligonucleotide
cuugguugcagaagccgcu

SEQ ID NO: 1905 - RNA, 19 nt, Artificial Sequence
  Description of Artificial Sequence: Synthetic oligonucleotide
gcuugguugcagaagccgc

SEQ ID NO: 1906 - RNA, 19 nt, Artificial Sequence
  Description of Artificial Sequence: Synthetic oligonucleotide
cgcuugguugcagaagccg

SEQ ID NO: 1907 - RNA, 19 nt, Artificial Sequence
  Description of Artificial Sequence: Synthetic oligonucleotide
ccgcuugguugcagaagcc

SEQ ID NO: 1908 - RNA, 19 nt, Artificial Sequence
  Description of Artificial Sequence: Synthetic oligonucleotide
cccgcuugguugcagaagc

SEQ ID NO: 1909 - RNA, 19 nt, Artificial Sequence
  Description of Artificial Sequence: Synthetic oligonucleotide
acccgcuugguugcagaag

SEQ ID NO: 1910 - RNA, 19 nt, Artificial Sequence
  Description of Artificial Sequence: Synthetic oligonucleotide
gacccgcuugguugcagaa

SEQ ID NO: 1911 - RNA, 19 nt, Artificial Sequence
  Description of Artificial Sequence: Synthetic oligonucleotide
agacccgcuugguugcaga

SEQ ID NO: 1912 - RNA, 19 nt, Artificial Sequence
  Description of Artificial Sequence: Synthetic oligonucleotide
aagacccgcuugguugcag

SEQ ID NO: 1913 - RNA, 19 nt, Artificial Sequence
  Description of Artificial Sequence: Synthetic oligonucleotide
uaagacccgcuugguugca

SEQ ID NO: 1914 - RNA, 19 nt, Artificial Sequence
  Description of Artificial Sequence: Synthetic oligonucleotide
guaagacccgcuugguugc

SEQ ID NO: 1915 - RNA, 19 nt, Artificial Sequence
  Description of Artificial Sequence: Synthetic oligonucleotide
gguaagacccgcuugguug

SEQ ID NO: 1916 - RNA, 19 nt, Artificial Sequence
  Description of Artificial Sequence: Synthetic oligonucleotide
ggguaagacccgcuugguu

SEQ ID NO: 1917 - RNA, 19 nt, Artificial Sequence
  Description of Artificial Sequence: Synthetic oligonucleotide
gggguaagacccgcuuggu

SEQ ID NO: 1918 - RNA, 19 nt, Artificial Sequence
  Description of Artificial Sequence: Synthetic oligonucleotide
ggggguaagacccgcuugg

SEQ ID NO: 1919 - RNA, 19 nt, Artificial Sequence
  Description of Artificial Sequence: Synthetic oligonucleotide
cggggguaagacccgcuug

SEQ ID NO: 1920 - RNA, 19 nt, Artificial Sequence
  Description of Artificial Sequence: Synthetic oligonucleotide
ccggggguaagacccgcuu

SEQ ID NO: 1921 - RNA, 19 nt, Artificial Sequence
  Description of Artificial Sequence: Synthetic oligonucleotide
accggggguaagacccgcu

SEQ ID NO: 1922 - RNA, 19 nt, Artificial Sequence
  Description of Artificial Sequence: Synthetic oligonucleotide
gaccggggguaagacccgc

SEQ ID NO: 1923 - RNA, 19 nt, Artificial Sequence
  Description of Artificial Sequence: Synthetic oligonucleotide
ggaccggggguaagacccg

SEQ ID NO: 1924 - RNA, 19 nt, Artificial Sequence
  Description of Artificial Sequence: Synthetic oligonucleotide
aggaccggggguaagaccc

SEQ ID NO: 1925 - RNA, 19 nt, Artificial Sequence
  Description of Artificial Sequence: Synthetic oligonucleotide
gaggaccggggguaagacc

SEQ ID NO: 1926 - RNA, 19 nt, Artificial Sequence
  Description of Artificial Sequence: Synthetic oligonucleotide
ggaggaccggggguaagac

SEQ ID NO: 1927 - RNA, 19 nt, Artificial Sequence
  Description of Artificial Sequence: Synthetic oligonucleotide
cggaggaccggggguaaga

SEQ ID NO: 1928 - RNA, 19 nt, Artificial Sequence
  Description of Artificial Sequence: Synthetic oligonucleotide
gcggaggaccggggguaag

SEQ ID NO: 1929 - RNA, 19 nt, Artificial Sequence
  Description of Artificial Sequence: Synthetic oligonucleotide
cgcggaggaccggggguaa

SEQ ID NO: 1930 - RNA, 19 nt, Artificial Sequence
  Description of Artificial Sequence: Synthetic oligonucleotide
acgcggaggaccgggggua

SEQ ID NO: 1931 - RNA, 19 nt, Artificial Sequence
  Description of Artificial Sequence: Synthetic oligonucleotide
gacgcggaggaccgggggu

SEQ ID NO: 1932 - RNA, 19 nt, Artificial Sequence
  Description of Artificial Sequence: Synthetic oligonucleotide
agacgcggaggaccggggg

SEQ ID NO: 1933 - RNA, 19 nt, Artificial Sequence
  Description of Artificial Sequence: Synthetic oligonucleotide
gagacgcggaggaccgggg

SEQ ID NO: 1934 - RNA, 19 nt, Artificial Sequence
  Description of Artificial Sequence: Synthetic oligonucleotide
ggagacgcggaggaccggg

SEQ ID NO: 1935 - RNA, 19 nt, Artificial Sequence
  Description of Artificial Sequence: Synthetic oligonucleotide
uggagacgcggaggaccgg

SEQ ID NO: 1936 - RNA, 19 nt, Artificial Sequence
  Description of Artificial Sequence: Synthetic oligonucleotide
cuggagacgcggaggaccg

SEQ ID NO: 1937 - RNA, 19 nt, Artificial Sequence
  Description of Artificial Sequence: Synthetic oligonucleotide
acuggagacgcggaggacc

SEQ ID NO: 1938 - RNA, 19 nt, Artificial Sequence
  Description of Artificial Sequence: Synthetic oligonucleotide
gacuggagacgcggaggac

SEQ ID NO: 1939 - RNA, 19 nt, Artificial Sequence
  Description of Artificial Sequence: Synthetic oligonucleotide
ggacuggagacgcggagga

SEQ ID NO: 1940 - RNA, 19 nt, Artificial Sequence
  Description of Artificial Sequence: Synthetic oligonucleotide
aggacuggagacgcggagg

SEQ ID NO: 1941 - RNA, 19 nt, Artificial Sequence
  Description of Artificial Sequence: Synthetic oligonucleotide
gaggacuggagacgcggag

SEQ ID NO: 1942 - RNA, 19 nt, Artificial Sequence
  Description of Artificial Sequence: Synthetic oligonucleotide
cgaggacuggagacgcgga

SEQ ID NO: 1943 - RNA, 19 nt, Artificial Sequence
  Description of Artificial Sequence: Synthetic oligonucleotide
gcgaggacuggagacgcgg

SEQ ID NO: 1944 - RNA, 19 nt, Artificial Sequence
  Description of Artificial Sequence: Synthetic oligonucleotide
ugcgaggacuggagacgcg

SEQ ID NO: 1945 - RNA, 19 nt, Artificial Sequence
  Description of Artificial Sequence: Synthetic oligonucleotide
gugcgaggacuggagacgc

SEQ ID NO: 1946 - RNA, 19 nt, Artificial Sequence
  Description of Artificial Sequence: Synthetic oligonucleotide
ggugcgaggacuggagacg

SEQ ID NO: 1947 - RNA, 19 nt, Artificial Sequence
  Description of Artificial Sequence: Synthetic oligonucleotide
aggugcgaggacuggagac

SEQ ID NO: 1948 - RNA, 19 nt, Artificial Sequence
  Description of Artificial Sequence: Synthetic oligonucleotide
caggugcgaggacuggaga

SEQ ID NO: 1949 - RNA, 19 nt, Artificial Sequence
  Description of Artificial Sequence: Synthetic oligonucleotide
ccaggugcgaggacuggag

SEQ ID NO: 1950 - RNA, 19 nt, Artificial Sequence
  Description of Artificial Sequence: Synthetic oligonucleotide
uccaggugcgaggacugga

SEQ ID NO: 1951 - RNA, 19 nt, Artificial Sequence
  Description of Artificial Sequence: Synthetic oligonucleotide
uuccaggugcgaggacugg

SEQ ID NO: 1952 - RNA, 19 nt, Artificial Sequence
  Description of Artificial Sequence: Synthetic oligonucleotide
guuccaggugcgaggacug

SEQ ID NO: 1953 - RNA, 19 nt, Artificial Sequence
  Description of Artificial Sequence: Synthetic oligonucleotide
gguuccaggugcgaggacu

SEQ ID NO: 1954 - RNA, 19 nt, Artificial Sequence
  Description of Artificial Sequence: Synthetic oligonucleotide
ggguuccaggugcgaggac

SEQ ID NO: 1955 - RNA, 19 nt, Artificial Sequence
  Description of Artificial Sequence: Synthetic oligonucleotide
gggguuccaggugcgagga

SEQ ID NO: 1956 - RNA, 19 nt, Artificial Sequence
  Description of Artificial Sequence: Synthetic oligonucleotide
ugggguuccaggugcgagg

SEQ ID NO: 1957 - RNA, 19 nt, Artificial Sequence
  Description of Artificial Sequence: Synthetic oligonucleotide
uugggguuccaggugcgag

SEQ ID NO: 1958 - RNA, 19 nt, Artificial Sequence
  Description of Artificial Sequence: Synthetic oligonucleotide
guugggguuccaggugcga

SEQ ID NO: 1959 - RNA, 19 nt, Artificial Sequence
  Description of Artificial Sequence: Synthetic oligonucleotide
cguugggguuccaggugcg

SEQ ID NO: 1960 - RNA, 19 nt, Artificial Sequence
  Description of Artificial Sequence: Synthetic oligonucleotide
acguugggguuccaggugc

SEQ ID NO: 1961 - RNA, 19 nt, Artificial Sequence
  Description of Artificial Sequence: Synthetic oligonucleotide
gacguugggguuccaggug

SEQ ID NO: 1962 - RNA, 19 nt, Artificial Sequence
  Description of Artificial Sequence: Synthetic oligonucleotide
ggacguugggguuccaggu

SEQ ID NO: 1963 - RNA, 19 nt, Artificial Sequence
  Description of Artificial Sequence: Synthetic oligonucleotide
gggacguugggguuccagg

SEQ ID NO: 1964 - RNA, 19 nt, Artificial Sequence
  Description of Artificial Sequence: Synthetic oligonucleotide
ggggacguugggguuccag

SEQ ID NO: 1965 - RNA, 19 nt, Artificial Sequence
  Description of Artificial Sequence: Synthetic oligonucleotide
cggggacguugggguucca

SEQ ID NO: 1966 - RNA, 19 nt, Artificial Sequence
  Description of Artificial Sequence: Synthetic oligonucleotide
ucggggacguugggguucc

SEQ ID NO: 1967 - RNA, 19 nt, Artificial Sequence
  Description of Artificial Sequence: Synthetic oligonucleotide
cucggggacguugggguuc

SEQ ID NO: 1968 - RNA, 19 nt, Artificial Sequence
  Description of Artificial Sequence: Synthetic oligonucleotide
ucucggggacguugggguu

SEQ ID NO: 1969 - RNA, 19 nt, Artificial Sequence
  Description of Artificial Sequence: Synthetic oligonucleotide
cucucggggacguuggggu

SEQ ID NO: 1970 - RNA, 19 nt, Artificial Sequence
  Description of Artificial Sequence: Synthetic oligonucleotide
acucucggggacguugggg

SEQ ID NO: 1971 - RNA, 19 nt, Artificial Sequence
  Description of Artificial Sequence: Synthetic oligonucleotide
gacucucggggacguuggg

SEQ ID NO: 1972 - RNA, 19 nt, Artificial Sequence
  Description of Artificial Sequence: Synthetic oligonucleotide
ggacucucggggacguugg

SEQ ID NO: 1973 - RNA, 19 nt, Artificial Sequence
  Description of Artificial Sequence: Synthetic oligonucleotide
gggacucucggggacguug

SEQ ID NO: 1974 - RNA, 19 nt, Artificial Sequence
  Description of Artificial Sequence: Synthetic oligonucleotide
ggggacucucggggacguu

SEQ ID NO: 1975 - RNA, 19 nt, Artificial Sequence
  Description of Artificial Sequence: Synthetic oligonucleotide
cggggacucucggggacgu

SEQ ID NO: 1976 - RNA, 19 nt, Artificial Sequence
  Description of Artificial Sequence: Synthetic oligonucleotide
ucggggacucucggggacg

SEQ ID NO: 1977 - RNA, 19 nt, Artificial Sequence
  Description of Artificial Sequence: Synthetic oligonucleotide
uucggggacucucggggac

SEQ ID NO: 1978 - RNA, 19 nt, Artificial Sequence
  Description of Artificial Sequence: Synthetic oligonucleotide
auucggggacucucgggga

SEQ ID NO: 1979 - RNA, 19 nt, Artificial Sequence
  Description of Artificial Sequence: Synthetic oligonucleotide
gauucggggacucucgggg

SEQ ID NO: 1980 - RNA, 19 nt, Artificial Sequence
  Description of Artificial Sequence: Synthetic oligonucleotide
ggauucggggacucucggg

SEQ ID NO: 1981 - RNA, 19 nt, Artificial Sequence
  Description of Artificial Sequence: Synthetic oligonucleotide
gggauucggggacucucgg

SEQ ID NO: 1982 - RNA, 19 nt, Artificial Sequence
  Description of Artificial Sequence: Synthetic oligonucleotide
ggggauucggggacucucg

SEQ ID NO: 1983 - RNA, 19 nt, Artificial Sequence
  Description of Artificial Sequence: Synthetic oligonucleotide
cggggauucggggacucuc

SEQ ID NO: 1984 - RNA, 19 nt, Artificial Sequence
  Description of Artificial Sequence: Synthetic oligonucleotide
gcggggauucggggacucu

SEQ ID NO: 1985 - RNA, 19 nt, Artificial Sequence
  Description of Artificial Sequence: Synthetic oligonucleotide
agcggggauucggggacuc

SEQ ID NO: 1986 - RNA, 19 nt, Artificial Sequence
  Description of Artificial Sequence: Synthetic oligonucleotide
gagcggggauucggggacu

SEQ ID NO: 1987 - RNA, 19 nt, Artificial Sequence
  Description of Artificial Sequence: Synthetic oligonucleotide
ggagcggggauucggggac

SEQ ID NO: 1988 - RNA, 19 nt, Artificial Sequence
  Description of Artificial Sequence: Synthetic oligonucleotide
gggagcggggauucgggga

SEQ ID NO: 1989 - RNA, 19 nt, Artificial Sequence
  Description of Artificial Sequence: Synthetic oligonucleotide
ugggagcggggauucgggg

SEQ ID NO: 1990 - RNA, 19 nt, Artificial Sequence
  Description of Artificial Sequence: Synthetic oligonucleotide
cugggagcggggauucggg

SEQ ID NO: 1991 - RNA, 19 nt, Artificial Sequence
  Description of Artificial Sequence: Synthetic oligonucleotide
ccugggagcggggauucgg

SEQ ID NO: 1992 - RNA, 19 nt, Artificial Sequence
  Description of Artificial Sequence: Synthetic oligonucleotide
gccugggagcggggauucg

SEQ ID NO: 1993 - RNA, 19 nt, Artificial Sequence
  Description of Artificial Sequence: Synthetic oligonucleotide
agccugggagcggggauuc

SEQ ID NO: 1994 - RNA, 19 nt, Artificial Sequence
  Description of Artificial Sequence: Synthetic oligonucleotide
uagccugggagcggggauu

SEQ ID NO: 1995 - RNA, 19 nt, Artificial Sequence
  Description of Artificial Sequence: Synthetic oligonucleotide
guagccugggagcggggau

SEQ ID NO: 1996 - RNA, 19 nt, Artificial Sequence
  Description of Artificial Sequence: Synthetic oligonucleotide
gguagccugggagcgggga

SEQ ID NO: 1997 - RNA, 19 nt, Artificial Sequence
  Description of Artificial Sequence: Synthetic oligonucleotide
agguagccugggagcgggg

SEQ ID NO: 1998 - RNA, 19 nt, Artificial Sequence
  Description of Artificial Sequence: Synthetic oligonucleotide
uagguagccugggagcggg

SEQ ID NO: 1999 - RNA, 19 nt, Artificial Sequence
  Description of Artificial Sequence: Synthetic oligonucleotide
uuagguagccugggagcgg

SEQ ID NO: 2000 - RNA, 19 nt, Artificial Sequence
  Description of Artificial Sequence: Synthetic oligonucleotide
cuuagguagccugggagcg

SEQ ID NO: 2001 - RNA, 19 nt, Artificial Sequence
  Description of Artificial Sequence: Synthetic oligonucleotide
ucuuagguagccugggagc

SEQ ID NO: 2002 - RNA, 19 nt, Artificial Sequence
  Description of Artificial Sequence: Synthetic oligonucleotide
cucuuagguagccugggag

SEQ ID NO: 2003 - RNA, 19 nt, Artificial Sequence
  Description of Artificial Sequence: Synthetic oligonucleotide
ccucuuagguagccuggga

SEQ ID NO: 2004 - RNA, 19 nt, Artificial Sequence
  Description of Artificial Sequence: Synthetic oligonucleotide
uccucuuagguagccuggg

SEQ ID NO: 2005 - RNA, 19 nt, Artificial Sequence
  Description of Artificial Sequence: Synthetic oligonucleotide
auccucuuagguagccugg

SEQ ID NO: 2006 - RNA, 19 nt, Artificial Sequence
  Description of Artificial Sequence: Synthetic oligonucleotide
cauccucuuagguagccug

SEQ ID NO: 2007 - RNA, 19 nt, Artificial Sequence
  Description of Artificial Sequence: Synthetic oligonucleotide
ucauccucuuagguagccu

SEQ ID NO: 2008 - RNA, 19 nt, Artificial Sequence
  Description of Artificial Sequence: Synthetic oligonucleotide
cucauccucuuagguagcc

SEQ ID NO: 2009 - RNA, 19 nt, Artificial Sequence
  Description of Artificial Sequence: Synthetic oligonucleotide
gcucauccucuuagguagc

SEQ ID NO: 2010 - RNA, 19 nt, Artificial Sequence
  Description of Artificial Sequence: Synthetic oligonucleotide
cgcucauccucuuagguag

SEQ ID NO: 2011 - RNA, 19 nt, Artificial Sequence
  Description of Artificial Sequence: Synthetic oligonucleotide
ccgcucauccucuuaggua

SEQ ID NO: 2012 - RNA, 19 nt, Artificial Sequence
  Description of Artificial Sequence: Synthetic oligonucleotide
accgcucauccucuuaggu

SEQ ID NO: 2013 - RNA, 19 nt, Artificial Sequence
  Description of Artificial Sequence: Synthetic oligonucleotide
caccgcucauccucuuagg

SEQ ID NO: 2014 - RNA, 19 nt, Artificial Sequence
  Description of Artificial Sequence: Synthetic oligonucleotide
gcaccgcucauccucuuag

SEQ ID NO: 2015 - RNA, 19 nt, Artificial Sequence
  Description of Artificial Sequence: Synthetic oligonucleotide
agcaccgcucauccucuua

SEQ ID NO: 2016 - RNA, 19 nt, Artificial Sequence
  Description of Artificial Sequence: Synthetic oligonucleotide
gagcaccgcucauccucuu

SEQ ID NO: 2017 - RNA, 19 nt, Artificial Sequence
  Description of Artificial Sequence: Synthetic oligonucleotide
ggagcaccgcucauccucu

SEQ ID NO: 2018 - RNA, 19 nt, Artificial Sequence
  Description of Artificial Sequence: Synthetic oligonucleotide
cggagcaccgcucauccuc

SEQ ID NO: 2019 - RNA, 19 nt, Artificial Sequence
  Description of Artificial Sequence: Synthetic oligonucleotide
ucggagcaccgcucauccu

SEQ ID NO: 2020 - RNA, 19 nt, Artificial Sequence
  Description of Artificial Sequence: Synthetic oligonucleotide
gucggagcaccgcucaucc

SEQ ID NO: 2021 - RNA, 19 nt, Artificial Sequence
  Description of Artificial Sequence: Synthetic oligonucleotide
cgucggagcaccgcucauc

SEQ ID NO: 2022 - RNA, 19 nt, Artificial Sequence
  Description of Artificial Sequence: Synthetic oligonucleotide
ccgucggagcaccgcucau

SEQ ID NO: 2023 - RNA, 19 nt, Artificial Sequence
  Description of Artificial Sequence: Synthetic oligonucleotide
gccgucggagcaccgcuca

SEQ ID NO: 2024 - RNA, 19 nt, Artificial Sequence
  Description of Artificial Sequence: Synthetic oligonucleotide
ggccgucggagcaccgcuc

SEQ ID NO: 2025 - RNA, 19 nt, Artificial Sequence
  Description of Artificial Sequence: Synthetic oligonucleotide
cggccgucggagcaccgcu

SEQ ID NO: 2026 - RNA, 19 nt, Artificial Sequence
  Description of Artificial Sequence: Synthetic oligonucleotide
ccggccgucggagcaccgc

SEQ ID NO: 2027 - RNA, 19 nt, Artificial Sequence
  Description of Artificial Sequence: Synthetic oligonucleotide
cccggccgucggagcaccg

SEQ ID NO: 2028 - RNA, 19 nt, Artificial Sequence
  Description of Artificial Sequence: Synthetic oligonucleotide
ccccggccgucggagcacc

SEQ ID NO: 2029 - RNA, 19 nt, Artificial Sequence
  Description of Artificial Sequence: Synthetic oligonucleotide
gccccggccgucggagcac

SEQ ID NO: 2030 - RNA, 19 nt, Artificial Sequence
  Description of Artificial Sequence: Synthetic oligonucleotide
ugccccggccgucggagca

SEQ ID NO: 2031 - RNA, 19 nt, Artificial Sequence
  Description of Artificial Sequence: Synthetic oligonucleotide
cugccccggccgucggagc

SEQ ID NO: 2032 - RNA, 19 nt, Artificial Sequence
  Description of Artificial Sequence: Synthetic oligonucleotide
gcugccccggccgucggag

SEQ ID NO: 2033 - RNA, 19 nt, Artificial Sequence
  Description of Artificial Sequence: Synthetic oligonucleotide
ggcugccccggccgucgga

SEQ ID NO: 2034 - RNA, 19 nt, Artificial Sequence
  Description of Artificial Sequence: Synthetic oligonucleotide
gggcugccccggccgucgg

SEQ ID NO: 2035 - RNA, 19 nt, Artificial Sequence
  Description of Artificial Sequence: Synthetic oligonucleotide
agggcugccccggccgucg

SEQ ID NO: 2036 - RNA, 19 nt, Artificial Sequence
  Description of Artificial Sequence: Synthetic oligonucleotide
cagggcugccccggccguc

SEQ ID NO: 2037 - RNA, 19 nt, Artificial Sequence
  Description of Artificial Sequence: Synthetic oligonucleotide
ucagggcugccccggccgu

SEQ ID NO: 2038 - RNA, 19 nt, Artificial Sequence
  Description of Artificial Sequence: Synthetic oligonucleotide
aucagggcugccccggccg

SEQ ID NO: 2039 - RNA, 19 nt, Artificial Sequence
  Description of Artificial Sequence: Synthetic oligonucleotide
caucagggcugccccggcc

SEQ ID NO: 2040 - RNA, 19 nt, Artificial Sequence
  Description of Artificial Sequence: Synthetic oligonucleotide
gcaucagggcugccccggc

SEQ ID NO: 2041 - RNA, 19 nt, Artificial Sequence
  Description of Artificial Sequence: Synthetic oligonucleotide
agcaucagggcugccccgg

SEQ ID NO: 2042 - RNA, 19 nt, Artificial Sequence
  Description of Artificial Sequence: Synthetic oligonucleotide
gagcaucagggcugccccg

SEQ ID NO: 2043 - RNA, 19 nt, Artificial Sequence
  Description of Artificial Sequence: Synthetic oligonucleotide
agagcaucagggcugcccc

SEQ ID NO: 2044 - RNA, 19 nt, Artificial Sequence
  Description of Artificial Sequence: Synthetic oligonucleotide
cagagcaucagggcugccc

SEQ ID NO: 2045 - RNA, 19 nt, Artificial Sequence
  Description of Artificial Sequence: Synthetic oligonucleotide
gcagagcaucagggcugcc

SEQ ID NO: 2046 - RNA, 19 nt, Artificial Sequence
  Description of Artificial Sequence: Synthetic oligonucleotide
cgcagagcaucagggcugc

SEQ ID NO: 2047 - RNA, 19 nt, Artificial Sequence
  Description of Artificial Sequence: Synthetic oligonucleotide
gcgcagagcaucagggcug

SEQ ID NO: 2048 - RNA, 19 nt, Artificial Sequence
  Description of Artificial Sequence: Synthetic oligonucleotide
ggcgcagagcaucagggcu

SEQ ID NO: 2049 - RNA, 19 nt, Artificial Sequence
  Description of Artificial Sequence: Synthetic oligonucleotide
cggcgcagagcaucagggc

SEQ ID NO: 2050 - RNA, 19 nt, Artificial Sequence
  Description of Artificial Sequence: Synthetic oligonucleotide
gcggcgcagagcaucaggg

SEQ ID NO: 2051 - RNA, 19 nt, Artificial Sequence
  Description of Artificial Sequence: Synthetic oligonucleotide
ggcggcgcagagcaucagg

SEQ ID NO: 2052 - RNA, 19 nt, Artificial Sequence
  Description of Artificial Sequence: Synthetic oligonucleotide
uggcggcgcagagcaucag

SEQ ID NO: 2053 - RNA, 19 nt, Artificial Sequence
  Description of Artificial Sequence: Synthetic oligonucleotide
guggcggcgcagagcauca

SEQ ID NO: 2054 - RNA, 19 nt, Artificial Sequence
  Description of Artificial Sequence: Synthetic oligonucleotide
gguggcggcgcagagcauc

SEQ ID NO: 2055 - RNA, 19 nt, Artificial Sequence
  Description of Artificial Sequence: Synthetic oligonucleotide
cgguggcggcgcagagcau

SEQ ID NO: 2056 - RNA, 19 nt, Artificial Sequence
  Description of Artificial Sequence: Synthetic oligonucleotide
gcgguggcggcgcagagca

SEQ ID NO: 2057 - RNA, 19 nt, Artificial Sequence
  Description of Artificial Sequence: Synthetic oligonucleotide
ggcgguggcggcgcagagc

SEQ ID NO: 2058 - RNA, 19 nt, Artificial Sequence
  Description of Artificial Sequence: Synthetic oligonucleotide
cggcgguggcggcgcagag

SEQ ID NO: 2059 - RNA, 19 nt, Artificial Sequence
  Description of Artificial Sequence: Synthetic oligonucleotide
acggcgguggcggcgcaga

SEQ ID NO: 2060 - RNA, 19 nt, Artificial Sequence
  Description of Artificial Sequence: Synthetic oligonucleotide
cacggcgguggcggcgcag

SEQ ID NO: 2061 - RNA, 19 nt, Artificial Sequence
  Description of Artificial Sequence: Synthetic oligonucleotide
gcacggcgguggcggcgca

SEQ ID NO: 2062 - RNA, 19 nt, Artificial Sequence
  Description of Artificial Sequence: Synthetic oligonucleotide
agcacggcgguggcggcgc

SEQ ID NO: 2063 - RNA, 19 nt, Artificial Sequence
  Description of Artificial Sequence: Synthetic oligonucleotide
uagcacggcgguggcggcg

SEQ ID NO: 2064 - RNA, 19 nt, Artificial Sequence
  Description of Artificial Sequence: Synthetic oligonucleotide
guagcacggcgguggcggc

SEQ ID NO: 2065 - RNA, 19 nt, Artificial Sequence
  Description of Artificial Sequence: Synthetic oligonucleotide
aguagcacggcgguggcgg

SEQ ID NO: 2066 - RNA, 19 nt, Artificial Sequence
  Description of Artificial Sequence: Synthetic oligonucleotide
caguagcacggcgguggcg

SEQ ID NO: 2067 - RNA, 19 nt, Artificial Sequence
  Description of Artificial Sequence: Synthetic oligonucleotide
ucaguagcacggcgguggc

SEQ ID NO: 2068 - RNA, 19 nt, Artificial Sequence
  Description of Artificial Sequence: Synthetic oligonucleotide
cucaguagcacggcggugg

SEQ ID NO: 2069 - RNA, 19 nt, Artificial Sequence
  Description of Artificial Sequence: Synthetic oligonucleotide
gcucaguagcacggcggug

SEQ ID NO: 2070 - RNA, 19 nt, Artificial Sequence
  Description of Artificial Sequence: Synthetic oligonucleotide
cgcucaguagcacggcggu

SEQ ID NO: 2071 - RNA, 19 nt, Artificial Sequence
  Description of Artificial Sequence: Synthetic oligonucleotide
gcgcucaguagcacggcgg

SEQ ID NO: 2072 - RNA, 19 nt, Artificial Sequence
  Description of Artificial Sequence: Synthetic oligonucleotide
agcgcucaguagcacggcg

SEQ ID NO: 2073 - RNA, 19 nt, Artificial Sequence
  Description of Artificial Sequence: Synthetic oligonucleotide
gagcgcucaguagcacggc

SEQ ID NO: 2074 - RNA, 19 nt, Artificial Sequence
  Description of Artificial Sequence: Synthetic oligonucleotide
ugagcgcucaguagcacgg

SEQ ID NO: 2075 - RNA, 19 nt, Artificial Sequence
  Description of Artificial Sequence: Synthetic oligonucleotide
cugagcgcucaguagcacg

SEQ ID NO: 2076 - RNA, 19 nt, Artificial Sequence
  Description of Artificial Sequence: Synthetic oligonucleotide
ccugagcgcucaguagcac

SEQ ID NO: 2077 - RNA, 19 nt, Artificial Sequence
  Description of Artificial Sequence: Synthetic oligonucleotide
cccugagcgcucaguagca

SEQ ID NO: 2078 - RNA, 19 nt, Artificial Sequence
  Description of Artificial Sequence: Synthetic oligonucleotide
gcccugagcgcucaguagc

SEQ ID NO: 2079 - RNA, 19 nt, Artificial Sequence
  Description of Artificial Sequence: Synthetic oligonucleotide
cgcccugagcgcucaguag

SEQ ID NO: 2080 - RNA, 19 nt, Artificial Sequence
  Description of Artificial Sequence: Synthetic oligonucleotide
ccgcccugagcgcucagua

SEQ ID NO: 2081 - RNA, 19 nt, Artificial Sequence
  Description of Artificial Sequence: Synthetic oligonucleotide
uccgcccugagcgcucagu

SEQ ID NO: 2082 - RNA, 19 nt, Artificial Sequence
  Description of Artificial Sequence: Synthetic oligonucleotide
guccgcccugagcgcucag

SEQ ID NO: 2083 - RNA, 19 nt, Artificial Sequence
  Description of Artificial Sequence: Synthetic oligonucleotide
gguccgcccugagcgcuca

SEQ ID NO: 2084 - RNA, 19 nt, Artificial Sequence
  Description of Artificial Sequence: Synthetic oligonucleotide
ggguccgcccugagcgcuc

SEQ ID NO: 2085 - RNA, 19 nt, Artificial Sequence
  Description of Artificial Sequence: Synthetic oligonucleotide
cggguccgcccugagcgcu

SEQ ID NO: 2086 - RNA, 19 nt, Artificial Sequence
  Description of Artificial Sequence: Synthetic oligonucleotide
acggguccgcccugagcgc

SEQ ID NO: 2087 - RNA, 19 nt, Artificial Sequence
  Description of Artificial Sequence: Synthetic oligonucleotide
cacggguccgcccugagcg

SEQ ID NO: 2088 - RNA, 19 nt, Artificial Sequence
  Description of Artificial Sequence: Synthetic oligonucleotide
gcacggguccgcccugagc

SEQ ID NO: 2089 - RNA, 19 nt, Artificial Sequence
  Description of Artificial Sequence: Synthetic oligonucleotide
ugcacggguccgcccugag

SEQ ID NO: 2090 - RNA, 19 nt, Artificial Sequence
  Description of Artificial Sequence: Synthetic oligonucleotide
cugcacggguccgcccuga

SEQ ID NO: 2091 - RNA, 19 nt, Artificial Sequence
  Description of Artificial Sequence: Synthetic oligonucleotide
acugcacggguccgcccug

SEQ ID NO: 2092 - RNA, 19 nt, Artificial Sequence
  Description of Artificial Sequence: Synthetic oligonucleotide
gacugcacggguccgcccu

SEQ ID NO: 2093 - RNA, 19 nt, Artificial Sequence
  Description of Artificial Sequence: Synthetic oligonucleotide
ggacugcacggguccgccc

SEQ ID NO: 2094 - RNA, 19 nt, Artificial Sequence
  Description of Artificial Sequence: Synthetic oligonucleotide
uggacugcacggguccgcc

SEQ ID NO: 2095 - RNA, 19 nt, Artificial Sequence
  Description of Artificial Sequence: Synthetic oligonucleotide
uuggacugcacggguccgc

SEQ ID NO: 2096 - RNA, 19 nt, Artificial Sequence
  Description of Artificial Sequence: Synthetic oligonucleotide
cuuggacugcacggguccg

SEQ ID NO: 2097 - RNA, 19 nt, Artificial Sequence
  Description of Artificial Sequence: Synthetic oligonucleotide
acuuggacugcacgggucc

SEQ ID NO: 2098 - RNA, 19 nt, Artificial Sequence
  Description of Artificial Sequence: Synthetic oligonucleotide
gacuuggacugcacggguc

SEQ ID NO: 2099 - RNA, 19 nt, Artificial Sequence
  Description of Artificial Sequence: Synthetic oligonucleotide
cgacuuggacugcacgggu

SEQ ID NO: 2100 - RNA, 19 nt, Artificial Sequence
  Description of Artificial Sequence: Synthetic oligonucleotide
gcgacuuggacugcacggg

SEQ ID NO: 2101 - RNA, 19 nt, Artificial Sequence
  Description of Artificial Sequence: Synthetic oligonucleotide
ggcgacuuggacugcacgg

SEQ ID NO: 2102 - RNA, 19 nt, Artificial Sequence
  Description of Artificial Sequence: Synthetic oligonucleotide
cggcgacuuggacugcacg

SEQ ID NO: 2103 - RNA, 19 nt, Artificial Sequence
  Description of Artificial Sequence: Synthetic oligonucleotide
gcggcgacuuggacugcac

SEQ ID NO: 2104 - RNA, 19 nt, Artificial Sequence
  Description of Artificial Sequence: Synthetic oligonucleotide
cgcggcgacuuggacugca

SEQ ID NO: 2105 - RNA, 19 nt, Artificial Sequence
  Description of Artificial Sequence: Synthetic oligonucleotide
gcgcggcgacuuggacugc

SEQ ID NO: 2106 - RNA, 19 nt, Artificial Sequence
  Description of Artificial Sequence: Synthetic oligonucleotide
agcgcggcgacuuggacug

SEQ ID NO: 2107 - RNA, 19 nt, Artificial Sequence
  Description of Artificial Sequence: Synthetic oligonucleotide
aagcgcggcgacuuggacu

SEQ ID NO: 2108 - RNA, 19 nt, Artificial Sequence
  Description of Artificial Sequence: Synthetic oligonucleotide
aaagcgcggcgacuuggac

SEQ ID NO: 2109 - RNA, 19 nt, Artificial Sequence
  Description of Artificial Sequence: Synthetic oligonucleotide
caaagcgcggcgacuugga

SEQ ID NO: 2110 - RNA, 19 nt, Artificial Sequence
  Description of Artificial Sequence: Synthetic oligonucleotide
gcaaagcgcggcgacuugg

SEQ ID NO: 2111 - RNA, 19 nt, Artificial Sequence
  Description of Artificial Sequence: Synthetic oligonucleotide
cgcaaagcgcggcgacuug

SEQ ID NO: 2112 - RNA, 19 nt, Artificial Sequence
  Description of Artificial Sequence: Synthetic oligonucleotide
acgcaaagcgcggcgacuu

SEQ ID NO: 2113 - RNA, 19 nt, Artificial Sequence
  Description of Artificial Sequence: Synthetic oligonucleotide
gacgcaaagcgcggcgacu

SEQ ID NO: 2114 - RNA, 19 nt, Artificial Sequence
  Description of Artificial Sequence: Synthetic oligonucleotide
ggacgcaaagcgcggcgac

SEQ ID NO: 2115 - RNA, 19 nt, Artificial Sequence
  Description of Artificial Sequence: Synthetic oligonucleotide
aggacgcaaagcgcggcga

SEQ ID NO: 2116 - RNA, 19 nt, Artificial Sequence
  Description of Artificial Sequence: Synthetic oligonucleotide
caggacgcaaagcgcggcg

SEQ ID NO: 2117 - RNA, 19 nt, Artificial Sequence
  Description of Artificial Sequence: Synthetic oligonucleotide
ccaggacgcaaagcgcggc

SEQ ID NO: 2118 - RNA, 19 nt, Artificial Sequence
  Description of Artificial Sequence: Synthetic oligonucleotide
cccaggacgcaaagcgcgg

SEQ ID NO: 2119 - RNA, 19 nt, Artificial Sequence
  Description of Artificial Sequence: Synthetic oligonucleotide
ucccaggacgcaaagcgcg

SEQ ID NO: 2120 - RNA, 19 nt, Artificial Sequence
  Description of Artificial Sequence: Synthetic oligonucleotide
gucccaggacgcaaagcgc

SEQ ID NO: 2121 - RNA, 19 nt, Artificial Sequence
  Description of Artificial Sequence: Synthetic oligonucleotide
cgucccaggacgcaaagcg

SEQ ID NO: 2122 - RNA, 19 nt, Artificial Sequence
  Description of Artificial Sequence: Synthetic oligonucleotide
ucgucccaggacgcaaagc

SEQ ID NO: 2123 - RNA, 19 nt, Artificial Sequence
  Description of Artificial Sequence: Synthetic oligonucleotide
cucgucccaggacgcaaag

SEQ ID NO: 2124 - RNA, 19 nt, Artificial Sequence
  Description of Artificial Sequence: Synthetic oligonucleotide
ucucgucccaggacgcaaa

SEQ ID NO: 2125 - RNA, 19 nt, Artificial Sequence
  Description of Artificial Sequence: Synthetic oligonucleotide
aucucgucccaggacgcaa

SEQ ID NO: 2126 - RNA, 19 nt, Artificial Sequence
  Description of Artificial Sequence: Synthetic oligonucleotide
caucucgucccaggacgca

SEQ ID NO: 2127 - RNA, 19 nt, Artificial Sequence
  Description of Artificial Sequence: Synthetic oligonucleotide
ucaucucgucccaggacgc

SEQ ID NO: 2128 - RNA, 19 nt, Artificial Sequence
  Description of Artificial Sequence: Synthetic oligonucleotide
uucaucucgucccaggacg

SEQ ID NO: 2129 - RNA, 19 nt, Artificial Sequence
  Description of Artificial Sequence: Synthetic oligonucleotide
auucaucucgucccaggac

SEQ ID NO: 2130 - RNA, 19 nt, Artificial Sequence
  Description of Artificial Sequence: Synthetic oligonucleotide
cauucaucucgucccagga

SEQ ID NO: 2131 - RNA, 19 nt, Artificial Sequence
  Description of Artificial Sequence: Synthetic oligonucleotide
acauucaucucgucccagg

SEQ ID NO: 2132 - RNA, 19 nt, Artificial Sequence
  Description of Artificial Sequence: Synthetic oligonucleotide
gacauucaucucgucccag

SEQ ID NO: 2133 - RNA, 19 nt, Artificial Sequence
  Description of Artificial Sequence: Synthetic oligonucleotide
ggacauucaucucguccca

SEQ ID NO: 2134 - RNA, 19 nt, Artificial Sequence
  Description of Artificial Sequence: Synthetic oligonucleotide
aggacauucaucucguccc

SEQ ID NO: 2135 - RNA, 19 nt, Artificial Sequence
  Description of Artificial Sequence: Synthetic oligonucleotide
caggacauucaucucgucc

SEQ ID NO: 2136 - RNA, 19 nt, Artificial Sequence
  Description of Artificial Sequence: Synthetic oligonucleotide
ccaggacauucaucucguc

SEQ ID NO: 2137 - RNA, 19 nt, Artificial Sequence
  Description of Artificial Sequence: Synthetic oligonucleotide
gccaggacauucaucucgu

SEQ ID NO: 2138 - RNA, 19 nt, Artificial Sequence
  Description of Artificial Sequence: Synthetic oligonucleotide
cgccaggacauucaucucg

SEQ ID NO: 2139 - RNA, 19 nt, Artificial Sequence
  Description of Artificial Sequence: Synthetic oligonucleotide
gcgccaggacauucaucuc

SEQ ID NO: 2140 - RNA, 19 nt, Artificial Sequence
  Description of Artificial Sequence: Synthetic oligonucleotide
ugcgccaggacauucaucu

SEQ ID NO: 2141 - RNA, 19 nt, Artificial Sequence
  Description of Artificial Sequence: Synthetic oligonucleotide
gugcgccaggacauucauc

SEQ ID NO: 2142 - RNA, 19 nt, Artificial Sequence
  Description of Artificial Sequence: Synthetic oligonucleotide
cgugcgccaggacauucau

SEQ ID NO: 2143 - RNA, 19 nt, Artificial Sequence
  Description of Artificial Sequence: Synthetic oligonucleotide
ccgugcgccaggacauuca

SEQ ID NO: 2144 - RNA, 19 nt, Artificial Sequence
  Description of Artificial Sequence: Synthetic oligonucleotide
uccgugcgccaggacauuc

SEQ ID NO: 2145 - RNA, 19 nt, Artificial Sequence
  Description of Artificial Sequence: Synthetic oligonucleotide
guccgugcgccaggacauu

SEQ ID NO: 2146 - RNA, 19 nt, Artificial Sequence
  Description of Artificial Sequence: Synthetic oligonucleotide
aguccgugcgccaggacau

SEQ ID NO: 2147 - RNA, 19 nt, Artificial Sequence
  Description of Artificial Sequence: Synthetic oligonucleotide
gaguccgugcgccaggaca

SEQ ID NO: 2148 - RNA, 19 nt, Artificial Sequence
  Description of Artificial Sequence: Synthetic oligonucleotide
ggaguccgugcgccaggac

SEQ ID NO: 2149 - RNA, 19 nt, Artificial Sequence
  Description of Artificial Sequence: Synthetic oligonucleotide
aggaguccgugcgccagga

SEQ ID NO: 2150 - RNA, 19 nt, Artificial Sequence
  Description of Artificial Sequence: Synthetic oligonucleotide
caggaguccgugcgccagg

SEQ ID NO: 2151 - RNA, 19 nt, Artificial Sequence
  Description of Artificial Sequence: Synthetic oligonucleotide
gcaggaguccgugcgccag

SEQ ID NO: 2152 - RNA, 19 nt, Artificial Sequence
  Description of Artificial Sequence: Synthetic oligonucleotide
ugcaggaguccgugcgcca

SEQ ID NO: 2153 - RNA, 19 nt, Artificial Sequence
  Description of Artificial Sequence: Synthetic oligonucleotide
cugcaggaguccgugcgcc

SEQ ID NO: 2154 - RNA, 19 nt, Artificial Sequence
  Description of Artificial Sequence: Synthetic oligonucleotide
gcugcaggaguccgugcgc

SEQ ID NO: 2155 - RNA, 19 nt, Artificial Sequence
  Description of Artificial Sequence: Synthetic oligonucleotide
agcugcaggaguccgugcg

SEQ ID NO: 2156 - RNA, 19 nt, Artificial Sequence
  Description of Artificial Sequence: Synthetic oligonucleotide
gagcugcaggaguccgugc

SEQ ID NO: 2157 - RNA, 19 nt, Artificial Sequence
  Description of Artificial Sequence: Synthetic oligonucleotide
cgagcugcaggaguccgug

SEQ ID NO: 2158 - RNA, 19 nt, Artificial Sequence
  Description of Artificial Sequence: Synthetic oligonucleotide
ccgagcugcaggaguccgu

SEQ ID NO: 2159 - RNA, 19 nt, Artificial Sequence
  Description of Artificial Sequence: Synthetic oligonucleotide
gccgagcugcaggaguccg

SEQ ID NO: 2160 - RNA, 19 nt, Artificial Sequence
  Description of Artificial Sequence: Synthetic oligonucleotide
ggccgagcugcaggagucc

SEQ ID NO: 2161 - RNA, 19 nt, Artificial Sequence
  Description of Artificial Sequence: Synthetic oligonucleotide
uggccgagcugcaggaguc

SEQ ID NO: 2162 - RNA, 19 nt, Artificial Sequence
  Description of Artificial Sequence: Synthetic oligonucleotide
cuggccgagcugcaggagu

SEQ ID NO: 2163 - RNA, 19 nt, Artificial Sequence
  Description of Artificial Sequence: Synthetic oligonucleotide
ccuggccgagcugcaggag

SEQ ID NO: 2164 - RNA, 19 nt, Artificial Sequence
  Description of Artificial Sequence: Synthetic oligonucleotide
cccuggccgagcugcagga

SEQ ID NO: 2165 - RNA, 19 nt, Artificial Sequence
  Description of Artificial Sequence: Synthetic oligonucleotide
ccccuggccgagcugcagg

SEQ ID NO: 2166 - RNA, 19 nt, Artificial Sequence
  Description of Artificial Sequence: Synthetic oligonucleotide
gccccuggccgagcugcag

SEQ ID NO: 2167 - RNA, 19 nt, Artificial Sequence
  Description of Artificial Sequence: Synthetic oligonucleotide
agccccuggccgagcugca

SEQ ID NO: 2168 - RNA, 19 nt, Artificial Sequence
  Description of Artificial Sequence: Synthetic oligonucleotide
cagccccuggccgagcugc

SEQ ID NO: 2169 - RNA, 19 nt, Artificial Sequence
  Description of Artificial Sequence: Synthetic oligonucleotide
gcagccccuggccgagcug

SEQ ID NO: 2170 - RNA, 19 nt, Artificial Sequence
  Description of Artificial Sequence: Synthetic oligonucleotide
cgcagccccuggccgagcu

SEQ ID NO: 2171 - RNA, 19 nt, Artificial Sequence
  Description of Artificial Sequence: Synthetic oligonucleotide
gcgcagccccuggccgagc

SEQ ID NO: 2172 - RNA, 19 nt, Artificial Sequence
  Description of Artificial Sequence: Synthetic oligonucleotide
cgcgcagccccuggccgag

SEQ ID NO: 2173 - RNA, 19 nt, Artificial Sequence
  Description of Artificial Sequence: Synthetic oligonucleotide
ucgcgcagccccuggccga

SEQ ID NO: 2174 - RNA, 19 nt, Artificial Sequence
  Description of Artificial Sequence: Synthetic oligonucleotide
uucgcgcagccccuggccg

SEQ ID NO: 2175 - RNA, 19 nt, Artificial Sequence
  Description of Artificial Sequence: Synthetic oligonucleotide
guucgcgcagccccuggcc

SEQ ID NO: 2176 - RNA, 19 nt, Artificial Sequence
  Description of Artificial Sequence: Synthetic oligonucleotide
uguucgcgcagccccuggc

SEQ ID NO: 2177 - RNA, 19 nt, Artificial Sequence
  Description of Artificial Sequence: Synthetic oligonucleotide
guguucgcgcagccccugg

SEQ ID NO: 2178 - RNA, 19 nt, Artificial Sequence
  Description of Artificial Sequence: Synthetic oligonucleotide
cguguucgcgcagccccug

SEQ ID NO: 2179 - RNA, 19 nt, Artificial Sequence
  Description of Artificial Sequence: Synthetic oligonucleotide
gcguguucgcgcagccccu

SEQ ID NO: 2180 - RNA, 19 nt, Artificial Sequence
  Description of Artificial Sequence: Synthetic oligonucleotide
cgcguguucgcgcagcccc

SEQ ID NO: 2181 - RNA, 19 nt, Artificial Sequence
  Description of Artificial Sequence: Synthetic oligonucleotide
ccgcguguucgcgcagccc

SEQ ID NO: 2182 - RNA, 19 nt, Artificial Sequence
  Description of Artificial Sequence: Synthetic oligonucleotide
uccgcguguucgcgcagcc

SEQ ID NO: 2183 - RNA, 19 nt, Artificial Sequence
  Description of Artificial Sequence: Synthetic oligonucleotide
cuccgcguguucgcgcagc

SEQ ID NO: 2184 - RNA, 19 nt, Artificial Sequence
  Description of Artificial Sequence: Synthetic oligonucleotide
gcuccgcguguucgcgcag

SEQ ID NO: 2185 - RNA, 19 nt, Artificial Sequence
  Description of Artificial Sequence: Synthetic oligonucleotide
cgcuccgcguguucgcgca

SEQ ID NO: 2186 - RNA, 19 nt, Artificial Sequence
  Description of Artificial Sequence: Synthetic oligonucleotide
gcgcuccgcguguucgcgc

SEQ ID NO: 2187 - RNA, 19 nt, Artificial Sequence
  Description of Artificial Sequence: Synthetic oligonucleotide
ugcgcuccgcguguucgcg

SEQ ID NO: 2188 - RNA, 19 nt, Artificial Sequence
  Description of Artificial Sequence: Synthetic oligonucleotide
gugcgcuccgcguguucgc

SEQ ID NO: 2189 - RNA, 19 nt, Artificial Sequence
  Description of Artificial Sequence: Synthetic oligonucleotide
ggugcgcuccgcguguucg

SEQ ID NO: 2190 - RNA, 19 nt, Artificial Sequence
  Description of Artificial Sequence: Synthetic oligonucleotide
gggugcgcuccgcguguuc

SEQ ID NO: 2191 - RNA, 19 nt, Artificial Sequence
  Description of Artificial Sequence: Synthetic oligonucleotide
cgggugcgcuccgcguguu

SEQ ID NO: 2192 - RNA, 19 nt, Artificial Sequence
  Description of Artificial Sequence: Synthetic oligonucleotide
gcgggugcgcuccgcgugu

SEQ ID NO: 2193 - RNA, 19 nt, Artificial Sequence
  Description of Artificial Sequence: Synthetic oligonucleotide
ugcgggugcgcuccgcgug

SEQ ID NO: 2194 - RNA, 19 nt, Artificial Sequence
  Description of Artificial Sequence: Synthetic oligonucleotide
cugcgggugcgcuccgcgu

SEQ ID NO: 2195 - RNA, 19 nt, Artificial Sequence
  Description of Artificial Sequence: Synthetic oligonucleotide
acugcgggugcgcuccgcg

SEQ ID NO: 2196 - RNA, 19 nt, Artificial Sequence
  Description of Artificial Sequence: Synthetic oligonucleotide
gacugcgggugcgcuccgc

SEQ ID NO: 2197 - RNA, 19 nt, Artificial Sequence
  Description of Artificial Sequence: Synthetic oligonucleotide
ugacugcgggugcgcuccg

SEQ ID NO: 2198 - RNA, 19 nt, Artificial Sequence
  Description of Artificial Sequence: Synthetic oligonucleotide
cugacugcgggugcgcucc

SEQ ID NO: 2199 - RNA, 19 nt, Artificial Sequence
  Description of Artificial Sequence: Synthetic oligonucleotide
gcugacugcgggugcgcuc

SEQ ID NO: 2200 - RNA, 19 nt, Artificial Sequence
  Description of Artificial Sequence: Synthetic oligonucleotide
agcugacugcgggugcgcu

SEQ ID NO: 2201 - RNA, 19 nt, Artificial Sequence
  Description of Artificial Sequence: Synthetic oligonucleotide
cagcugacugcgggugcgc

SEQ ID NO: 2202 - RNA, 19 nt, Artificial Sequence
  Description of Artificial Sequence: Synthetic oligonucleotide
ucagcugacugcgggugcg

SEQ ID NO: 2203 - RNA, 19 nt, Artificial Sequence
  Description of Artificial Sequence: Synthetic oligonucleotide
cucagcugacugcgggugc

SEQ ID NO: 2204 - RNA, 19 nt, Artificial Sequence
  Description of Artificial Sequence: Synthetic oligonucleotide
gcucagcugacugcgggug

SEQ ID NO: 2205 - RNA, 19 nt, Artificial Sequence
  Description of Artificial Sequence: Synthetic oligonucleotide
cgcucagcugacugcgggu

SEQ ID NO: 2206 - RNA, 19 nt, Artificial Sequence
  Description of Artificial Sequence: Synthetic oligonucleotide
gcgcucagcugacugcggg

SEQ ID NO: 2207 - RNA, 19 nt, Artificial Sequence
  Description of Artificial Sequence: Synthetic oligonucleotide
cgcgcucagcugacugcgg

SEQ ID NO: 2208 - RNA, 19 nt, Artificial Sequence
  Description of Artificial Sequence: Synthetic oligonucleotide
gcgcgcucagcugacugcg

SEQ ID NO: 2209 - RNA, 19 nt, Artificial Sequence
  Description of Artificial Sequence: Synthetic oligonucleotide
agcgcgcucagcugacugc

SEQ ID NO: 2210 - RNA, 19 nt, Artificial Sequence
  Description of Artificial Sequence: Synthetic oligonucleotide
cagcgcgcucagcugacug

SEQ ID NO: 2211 - RNA, 19 nt, Artificial Sequence
  Description of Artificial Sequence: Synthetic oligonucleotide
ccagcgcgcucagcugacu

SEQ ID NO: 2212 - RNA, 19 nt, Artificial Sequence
  Description of Artificial Sequence: Synthetic oligonucleotide
uccagcgcgcucagcugac

SEQ ID NO: 2213 - RNA, 19 nt, Artificial Sequence
  Description of Artificial Sequence: Synthetic oligonucleotide
cuccagcgcgcucagcuga

SEQ ID NO: 2214 - RNA, 19 nt, Artificial Sequence
  Description of Artificial Sequence: Synthetic oligonucleotide
gcuccagcgcgcucagcug

SEQ ID NO: 2215 - RNA, 19 nt, Artificial Sequence
  Description of Artificial Sequence: Synthetic oligonucleotide
cgcuccagcgcgcucagcu

SEQ ID NO: 2216 - RNA, 19 nt, Artificial Sequence
  Description of Artificial Sequence: Synthetic oligonucleotide
ccgcuccagcgcgcucagc

SEQ ID NO: 2217 - RNA, 19 nt, Artificial Sequence
  Description of Artificial Sequence: Synthetic oligonucleotide
gccgcuccagcgcgcucag

SEQ ID NO: 2218 - RNA, 19 nt, Artificial Sequence
  Description of Artificial Sequence: Synthetic oligonucleotide
cgccgcuccagcgcgcuca

SEQ ID NO: 2219 - RNA, 19 nt, Artificial Sequence
  Description of Artificial Sequence: Synthetic oligonucleotide
gcgccgcuccagcgcgcuc

SEQ ID NO: 2220 - RNA, 19 nt, Artificial Sequence
  Description of Artificial Sequence: Synthetic oligonucleotide
ggcgccgcuccagcgcgcu

SEQ ID NO: 2221 - RNA, 19 nt, Artificial Sequence
  Description of Artificial Sequence: Synthetic oligonucleotide
aggcgccgcuccagcgcgc

SEQ ID NO: 2222 - RNA, 19 nt, Artificial Sequence
  Description of Artificial Sequence: Synthetic oligonucleotide
caggcgccgcuccagcgcg

SEQ ID NO: 2223 - RNA, 19 nt, Artificial Sequence
  Description of Artificial Sequence: Synthetic oligonucleotide
ucaggcgccgcuccagcgc

SEQ ID NO: 2224 - RNA, 19 nt, Artificial Sequence
  Description of Artificial Sequence: Synthetic oligonucleotide
cucaggcgccgcuccagcg

SEQ ID NO: 2225 - RNA, 19 nt, Artificial Sequence
  Description of Artificial Sequence: Synthetic oligonucleotide
gcucaggcgccgcuccagc

SEQ ID NO: 2226 - RNA, 19 nt, Artificial Sequence
  Description of Artificial Sequence: Synthetic oligonucleotide
cgcucaggcgccgcuccag

SEQ ID NO: 2227 - RNA, 19 nt, Artificial Sequence
  Description of Artificial Sequence: Synthetic oligonucleotide
gcgcucaggcgccgcucca

SEQ ID NO: 2228 - RNA, 19 nt, Artificial Sequence
  Description of Artificial Sequence: Synthetic oligonucleotide
cgcgcucaggcgccgcucc

SEQ ID NO: 2229 - RNA, 19 nt, Artificial Sequence
  Description of Artificial Sequence: Synthetic oligonucleotide
acgcgcucaggcgccgcuc

SEQ ID NO: 2230 - RNA, 19 nt, Artificial Sequence
  Description of Artificial Sequence: Synthetic oligonucleotide
cacgcgcucaggcgccgcu

SEQ ID NO: 2231 - RNA, 19 nt, Artificial Sequence
  Description of Artificial Sequence: Synthetic oligonucleotide
gcacgcgcucaggcgccgc

SEQ ID NO: 2232 - RNA, 19 nt, Artificial Sequence
  Description of Artificial Sequence: Synthetic oligonucleotide
cgcacgcgcucaggcgccg

SEQ ID NO: 2233 - RNA, 19 nt, Artificial Sequence
  Description of Artificial Sequence: Synthetic oligonucleotide
ccgcacgcgcucaggcgcc

SEQ ID NO: 2234 - RNA, 19 nt, Artificial Sequence
  Description of Artificial Sequence: Synthetic oligonucleotide
cccgcacgcgcucaggcgc

SEQ ID NO: 2235 - RNA, 19 nt, Artificial Sequence
  Description of Artificial Sequence: Synthetic oligonucleotide
acccgcacgcgcucaggcg

SEQ ID NO: 2236 - RNA, 19 nt, Artificial Sequence
  Description of Artificial Sequence: Synthetic oligonucleotide
gacccgcacgcgcucaggc

SEQ ID NO: 2237 - RNA, 19 nt, Artificial Sequence
  Description of Artificial Sequence: Synthetic oligonucleotide
ggacccgcacgcgcucagg

SEQ ID NO: 2238 - RNA, 19 nt, Artificial Sequence
  Description of Artificial Sequence: Synthetic oligonucleotide
cggacccgcacgcgcucag

SEQ ID NO: 2239 - RNA, 19 nt, Artificial Sequence
  Description of Artificial Sequence: Synthetic oligonucleotide
gcggacccgcacgcgcuca

SEQ ID NO: 2240 - RNA, 19 nt, Artificial Sequence
  Description of Artificial Sequence: Synthetic oligonucleotide
ggcggacccgcacgcgcuc

SEQ ID NO: 2241 - RNA, 19 nt, Artificial Sequence
  Description of Artificial Sequence: Synthetic oligonucleotide
aggcggacccgcacgcgcu

SEQ ID NO: 2242 - RNA, 19 nt, Artificial Sequence
  Description of Artificial Sequence: Synthetic oligonucleotide
caggcggacccgcacgcgc

SEQ ID NO: 2243 - RNA, 19 nt, Artificial Sequence
  Description of Artificial Sequence: Synthetic oligonucleotide
acaggcggacccgcacgcg

SEQ ID NO: 2244 - RNA, 19 nt, Artificial Sequence
  Description of Artificial Sequence: Synthetic oligonucleotide
gacaggcggacccgcacgc

SEQ ID NO: 2245 - RNA, 19 nt, Artificial Sequence
  Description of Artificial Sequence: Synthetic oligonucleotide
ugacaggcggacccgcacg

SEQ ID NO: 2246 - RNA, 19 nt, Artificial Sequence
  Description of Artificial Sequence: Synthetic oligonucleotide
cugacaggcggacccgcac

SEQ ID NO: 2247 - RNA, 19 nt, Artificial Sequence
  Description of Artificial Sequence: Synthetic oligonucleotide
ccugacaggcggacccgca

SEQ ID NO: 2248 - RNA, 19 nt, Artificial Sequence
  Description of Artificial Sequence: Synthetic oligonucleotide
cccugacaggcggacccgc

SEQ ID NO: 2249 - RNA, 19 nt, Artificial Sequence
  Description of Artificial Sequence: Synthetic oligonucleotide
ucccugacaggcggacccg

SEQ ID NO: 2250 - RNA, 19 nt, Artificial Sequence
  Description of Artificial Sequence: Synthetic oligonucleotide
uucccugacaggcggaccc

SEQ ID NO: 2251 - RNA, 19 nt, Artificial Sequence
  Description of Artificial Sequence: Synthetic oligonucleotide
guucccugacaggcggacc

SEQ ID NO: 2252 - RNA, 19 nt, Artificial Sequence
  Description of Artificial Sequence: Synthetic oligonucleotide
gguucccugacaggcggac

SEQ ID NO: 2253 - RNA, 19 nt, Artificial Sequence
  Description of Artificial Sequence: Synthetic oligonucleotide
cgguucccugacaggcgga

SEQ ID NO: 2254 - RNA, 19 nt, Artificial Sequence
  Description of Artificial Sequence: Synthetic oligonucleotide
ucgguucccugacaggcgg

SEQ ID NO: 2255 - RNA, 19 nt, Artificial Sequence
  Description of Artificial Sequence: Synthetic oligonucleotide
cucgguucccugacaggcg

SEQ ID NO: 2256 - RNA, 19 nt, Artificial Sequence
  Description of Artificial Sequence: Synthetic oligonucleotide
ccucgguucccugacaggc

SEQ ID NO: 2257 - RNA, 19 nt, Artificial Sequence
  Description of Artificial Sequence: Synthetic oligonucleotide
cccucgguucccugacagg

SEQ ID NO: 2258 - RNA, 19 nt, Artificial Sequence
  Description of Artificial Sequence: Synthetic oligonucleotide
ccccucgguucccugacag

SEQ ID NO: 2259 - RNA, 19 nt, Artificial Sequence
  Description of Artificial Sequence: Synthetic oligonucleotide
accccucgguucccugaca

SEQ ID NO: 2260 - RNA, 19 nt, Artificial Sequence
  Description of Artificial Sequence: Synthetic oligonucleotide
gaccccucgguucccugac

SEQ ID NO: 2261 - RNA, 19 nt, Artificial Sequence
  Description of Artificial Sequence: Synthetic oligonucleotide
ggaccccucgguucccuga

SEQ ID NO: 2262 - RNA, 19 nt, Artificial Sequence
  Description of Artificial Sequence: Synthetic oligonucleotide
uggaccccucgguucccug

SEQ ID NO: 2263 - RNA, 19 nt, Artificial Sequence
  Description of Artificial Sequence: Synthetic oligonucleotide
guggaccccucgguucccu

SEQ ID NO: 2264 - RNA, 19 nt, Artificial Sequence
  Description of Artificial Sequence: Synthetic oligonucleotide
gguggaccccucgguuccc

SEQ ID NO: 2265 - RNA, 19 nt, Artificial Sequence
  Description of Artificial Sequence: Synthetic oligonucleotide
cgguggaccccucgguucc

SEQ ID NO: 2266 - RNA, 19 nt, Artificial Sequence
  Description of Artificial Sequence: Synthetic oligonucleotide
ucgguggaccccucgguuc

SEQ ID NO: 2267 - RNA, 19 nt, Artificial Sequence
  Description of Artificial Sequence: Synthetic oligonucleotide
gucgguggaccccucgguu

SEQ ID NO: 2268 - RNA, 19 nt, Artificial Sequence
  Description of Artificial Sequence: Synthetic oligonucleotide
ggucgguggaccccucggu

SEQ ID NO: 2269 - RNA, 19 nt, Artificial Sequence
  Description of Artificial Sequence: Synthetic oligonucleotide
aggucgguggaccccucgg

SEQ ID NO: 2270 - RNA, 19 nt, Artificial Sequence
  Description of Artificial Sequence: Synthetic oligonucleotide
gaggucgguggaccccucg

SEQ ID NO: 2271 - RNA, 19 nt, Artificial Sequence
  Description of Artificial Sequence: Synthetic oligonucleotide
ggaggucgguggaccccuc

SEQ ID NO: 2272 - RNA, 19 nt, Artificial Sequence
  Description of Artificial Sequence: Synthetic oligonucleotide
gggaggucgguggaccccu

SEQ ID NO: 2273 - RNA, 19 nt, Artificial Sequence
  Description of Artificial Sequence: Synthetic oligonucleotide
cgggaggucgguggacccc

SEQ ID NO: 2274 - RNA, 19 nt, Artificial Sequence
  Description of Artificial Sequence: Synthetic oligonucleotide
acgggaggucgguggaccc

SEQ ID NO: 2275 - RNA, 19 nt, Artificial Sequence
  Description of Artificial Sequence: Synthetic oligonucleotide
aacgggaggucgguggacc

SEQ ID NO: 2276 - RNA, 19 nt, Artificial Sequence
  Description of Artificial Sequence: Synthetic oligonucleotide
uaacgggaggucgguggac

SEQ ID NO: 2277 - RNA, 19 nt, Artificial Sequence
  Description of Artificial Sequence: Synthetic oligonucleotide
cuaacgggaggucggugga

SEQ ID NO: 2278 - RNA, 19 nt, Artificial Sequence
  Description of Artificial Sequence: Synthetic oligonucleotide
gcuaacgggaggucggugg

SEQ ID NO: 2279 - RNA, 19 nt, Artificial Sequence
  Description of Artificial Sequence: Synthetic oligonucleotide
ggcuaacgggaggucggug

SEQ ID NO: 2280 - RNA, 19 nt, Artificial Sequence
  Description of Artificial Sequence: Synthetic oligonucleotide
gggcuaacgggaggucggu

SEQ ID NO: 2281 - RNA, 19 nt, Artificial Sequence
  Description of Artificial Sequence: Synthetic oligonucleotide
ggggcuaacgggaggucgg

SEQ ID NO: 2282 - RNA, 19 nt, Artificial Sequence
  Description of Artificial Sequence: Synthetic oligonucleotide
aggggcuaacgggaggucg

SEQ ID NO: 2283 - RNA, 19 nt, Artificial Sequence
  Description of Artificial Sequence: Synthetic oligonucleotide
caggggcuaacgggagguc

SEQ ID NO: 2284 - RNA, 19 nt, Artificial Sequence
  Description of Artificial Sequence: Synthetic oligonucleotide
ucaggggcuaacgggaggu

SEQ ID NO: 2285 - RNA, 19 nt, Artificial Sequence
  Description of Artificial Sequence: Synthetic oligonucleotide
cucaggggcuaacgggagg

SEQ ID NO: 2286 - RNA, 19 nt, Artificial Sequence
  Description of Artificial Sequence: Synthetic oligonucleotide
ucucaggggcuaacgggag

SEQ ID NO: 2287 - RNA, 19 nt, Artificial Sequence
  Description of Artificial Sequence: Synthetic oligonucleotide
cucucaggggcuaacggga

SEQ ID NO: 2288 - RNA, 19 nt, Artificial Sequence
  Description of Artificial Sequence: Synthetic oligonucleotide
gcucucaggggcuaacggg

SEQ ID NO: 2289 - RNA, 19 nt, Artificial Sequence
  Description of Artificial Sequence: Synthetic oligonucleotide
ggcucucaggggcuaacgg

SEQ ID NO: 2290 - RNA, 19 nt, Artificial Sequence
  Description of Artificial Sequence: Synthetic oligonucleotide
cggcucucaggggcuaacg

SEQ ID NO: 2291 - RNA, 19 nt, Artificial Sequence
  Description of Artificial Sequence: Synthetic oligonucleotide
ccggcucucaggggcuaac

SEQ ID NO: 2292 - RNA, 19 nt, Artificial Sequence
  Description of Artificial Sequence: Synthetic oligonucleotide
cccggcucucaggggcuaa

SEQ ID NO: 2293 - RNA, 19 nt, Artificial Sequence
  Description of Artificial Sequence: Synthetic oligonucleotide
acccggcucucaggggcua

SEQ ID NO: 2294 - RNA, 19 nt, Artificial Sequence
  Description of Artificial Sequence: Synthetic oligonucleotide
cacccggcucucaggggcu

SEQ ID NO: 2295 - RNA, 19 nt, Artificial Sequence
  Description of Artificial Sequence: Synthetic oligonucleotide
ccacccggcucucaggggc

SEQ ID NO: 2296 - RNA, 19 nt, Artificial Sequence
  Description of Artificial Sequence: Synthetic oligonucleotide
uccacccggcucucagggg

SEQ ID NO: 2297 - RNA, 19 nt, Artificial Sequence
  Description of Artificial Sequence: Synthetic oligonucleotide
guccacccggcucucaggg

SEQ ID NO: 2298 - RNA, 19 nt, Artificial Sequence
  Description of Artificial Sequence: Synthetic oligonucleotide
gguccacccggcucucagg

SEQ ID NO: 2299 - RNA, 19 nt, Artificial Sequence
  Description of Artificial Sequence: Synthetic oligonucleotide
ggguccacccggcucucag

SEQ ID NO: 2300 - RNA, 19 nt, Artificial Sequence
  Description of Artificial Sequence: Synthetic oligonucleotide
aggguccacccggcucuca

SEQ ID NO: 2301 - RNA, 19 nt, Artificial Sequence
  Description of Artificial Sequence: Synthetic oligonucleotide
caggguccacccggcucuc

SEQ ID NO: 2302 - RNA, 19 nt, Artificial Sequence
  Description of Artificial Sequence: Synthetic oligonucleotide
ucaggguccacccggcucu

SEQ ID NO: 2303 - RNA, 19 nt, Artificial Sequence
  Description of Artificial Sequence: Synthetic oligonucleotide
cucaggguccacccggcuc

SEQ ID NO: 2304 - RNA, 19 nt, Artificial Sequence
  Description of Artificial Sequence: Synthetic oligonucleotide
ccucaggguccacccggcu

SEQ ID NO: 2305 - RNA, 19 nt, Artificial Sequence
  Description of Artificial Sequence: Synthetic oligonucleotide
accucaggguccacccggc

SEQ ID NO: 2306 - RNA, 19 nt, Artificial Sequence
  Description of Artificial Sequence: Synthetic oligonucleotide
gaccucaggguccacccgg

SEQ ID NO: 2307 - RNA, 19 nt, Artificial Sequence
  Description of Artificial Sequence: Synthetic oligonucleotide
ggaccucaggguccacccg

SEQ ID NO: 2308 - RNA, 19 nt, Artificial Sequence
  Description of Artificial Sequence: Synthetic oligonucleotide
aggaccucaggguccaccc

SEQ ID NO: 2309 - RNA, 19 nt, Artificial Sequence
  Description of Artificial Sequence: Synthetic oligonucleotide
aaggaccucaggguccacc

SEQ ID NO: 2310 - RNA, 19 nt, Artificial Sequence
  Description of Artificial Sequence: Synthetic oligonucleotide
gaaggaccucaggguccac

SEQ ID NO: 2311 - RNA, 19 nt, Artificial Sequence
  Description of Artificial Sequence: Synthetic oligonucleotide
ugaaggaccucagggucca

SEQ ID NO: 2312 - RNA, 19 nt, Artificial Sequence
  Description of Artificial Sequence: Synthetic oligonucleotide
gugaaggaccucagggucc

SEQ ID NO: 2313 - RNA, 19 nt, Artificial Sequence
  Description of Artificial Sequence: Synthetic oligonucleotide
ugugaaggaccucaggguc

SEQ ID NO: 2314 - RNA, 19 nt, Artificial Sequence
  Description of Artificial Sequence: Synthetic oligonucleotide
cugugaaggaccucagggu

SEQ ID NO: 2315 - RNA, 19 nt, Artificial Sequence
  Description of Artificial Sequence: Synthetic oligonucleotide
gcugugaaggaccucaggg

SEQ ID NO: 2316 - RNA, 19 nt, Artificial Sequence
  Description of Artificial Sequence: Synthetic oligonucleotide
ggcugugaaggaccucagg

SEQ ID NO: 2317 - RNA, 19 nt, Artificial Sequence
  Description of Artificial Sequence: Synthetic oligonucleotide
aggcugugaaggaccucag

SEQ ID NO: 2318 - RNA, 19 nt, Artificial Sequence
  Description of Artificial Sequence: Synthetic oligonucleotide
caggcugugaaggaccuca

SEQ ID NO: 2319 - RNA, 19 nt, Artificial Sequence
  Description of Artificial Sequence: Synthetic oligonucleotide
gcaggcugugaaggaccuc

SEQ ID NO: 2320 - RNA, 19 nt, Artificial Sequence
  Description of Artificial Sequence: Synthetic oligonucleotide
ugcaggcugugaaggaccu

SEQ ID NO: 2321 - RNA, 19 nt, Artificial Sequence
  Description of Artificial Sequence: Synthetic oligonucleotide
cugcaggcugugaaggacc

SEQ ID NO: 2322 - RNA, 19 nt, Artificial Sequence
  Description of Artificial Sequence: Synthetic oligonucleotide
ucugcaggcugugaaggac

SEQ ID NO: 2323 - RNA, 19 nt, Artificial Sequence
  Description of Artificial Sequence: Synthetic oligonucleotide
gucugcaggcugugaagga

SEQ ID NO: 2324 - RNA, 19 nt, Artificial Sequence
  Description of Artificial Sequence: Synthetic oligonucleotide
ugucugcaggcugugaagg

SEQ ID NO: 2325 - RNA, 19 nt, Artificial Sequence
  Description of Artificial Sequence: Synthetic oligonucleotide
gugucugcaggcugugaag

SEQ ID NO: 2326 - RNA, 19 nt, Artificial Sequence
  Description of Artificial Sequence: Synthetic oligonucleotide
ugugucugcaggcugugaa

SEQ ID NO: 2327 - RNA, 19 nt, Artificial Sequence
  Description of Artificial Sequence: Synthetic oligonucleotide
uugugucugcaggcuguga

SEQ ID NO: 2328 - RNA, 19 nt, Artificial Sequence
  Description of Artificial Sequence: Synthetic oligonucleotide
guugugucugcaggcugug

SEQ ID NO: 2329 - RNA, 19 nt, Artificial Sequence
  Description of Artificial Sequence: Synthetic oligonucleotide
aguugugucugcaggcugu

SEQ ID NO: 2330 - RNA, 19 nt, Artificial Sequence
  Description of Artificial Sequence: Synthetic oligonucleotide
gaguugugucugcaggcug

SEQ ID NO: 2331 - RNA, 19 nt, Artificial Sequence
  Description of Artificial Sequence: Synthetic oligonucleotide
ugaguugugucugcaggcu

SEQ ID NO: 2332 - RNA, 19 nt, Artificial Sequence
  Description of Artificial Sequence: Synthetic oligonucleotide
uugaguugugucugcaggc

SEQ ID NO: 2333 - RNA, 19 nt, Artificial Sequence
  Description of Artificial Sequence: Synthetic oligonucleotide
cuugaguugugucugcagg

SEQ ID NO: 2334 - RNA, 19 nt, Artificial Sequence
  Description of Artificial Sequence: Synthetic oligonucleotide
ccuugaguugugucugcag

SEQ ID NO: 2335 - RNA, 19 nt, Artificial Sequence
  Description of Artificial Sequence: Synthetic oligonucleotide
gccuugaguugugucugca

SEQ ID NO: 2336 - RNA, 19 nt, Artificial Sequence
  Description of Artificial Sequence: Synthetic oligonucleotide
agccuugaguugugucugc

SEQ ID NO: 2337 - RNA, 19 nt, Artificial Sequence
  Description of Artificial Sequence: Synthetic oligonucleotide
gagccuugaguugugucug

SEQ ID NO: 2338 - RNA, 19 nt, Artificial Sequence
  Description of Artificial Sequence: Synthetic oligonucleotide
ugagccuugaguugugucu

SEQ ID NO: 2339 - RNA, 19 nt, Artificial Sequence
  Description of Artificial Sequence: Synthetic oligonucleotide
cugagccuugaguuguguc

SEQ ID NO: 2340 - RNA, 19 nt, Artificial Sequence
  Description of Artificial Sequence: Synthetic oligonucleotide
ucugagccuugaguugugu

SEQ ID NO: 2341 - RNA, 19 nt, Artificial Sequence
  Description of Artificial Sequence: Synthetic oligonucleotide
uucugagccuugaguugug

SEQ ID NO: 2342 - RNA, 19 nt, Artificial Sequence
  Description of Artificial Sequence: Synthetic oligonucleotide
guucugagccuugaguugu

SEQ ID NO: 2343 - RNA, 19 nt, Artificial Sequence
  Description of Artificial Sequence: Synthetic oligonucleotide
uguucugagccuugaguug

SEQ ID NO: 2344 - RNA, 19 nt, Artificial Sequence
  Description of Artificial Sequence: Synthetic oligonucleotide
cuguucugagccuugaguu

SEQ ID NO: 2345 - RNA, 19 nt, Artificial Sequence
  Description of Artificial Sequence: Synthetic oligonucleotide
gcuguucugagccuugagu

SEQ ID NO: 2346 - RNA, 19 nt, Artificial Sequence
  Description of Artificial Sequence: Synthetic oligonucleotide
ugcuguucugagccuugag

SEQ ID NO: 2347 - RNA, 19 nt, Artificial Sequence
  Description of Artificial Sequence: Synthetic oligonucleotide
cugcuguucugagccuuga

SEQ ID NO: 2348 - RNA, 19 nt, Artificial Sequence
  Description of Artificial Sequence: Synthetic oligonucleotide
ccugcuguucugagccuug

SEQ ID NO: 2349 - RNA, 19 nt, Artificial Sequence
  Description of Artificial Sequence: Synthetic oligonucleotide
uccugcuguucugagccuu

SEQ ID NO: 2350 - RNA, 19 nt, Artificial Sequence
  Description of Artificial Sequence: Synthetic oligonucleotide
auccugcuguucugagccu

SEQ ID NO: 2351 - RNA, 19 nt, Artificial Sequence
  Description of Artificial Sequence: Synthetic oligonucleotide
gauccugcuguucugagcc

SEQ ID NO: 2352 - RNA, 19 nt, Artificial Sequence
  Description of Artificial Sequence: Synthetic oligonucleotide
ggauccugcuguucugagc

SEQ ID NO: 2353 - RNA, 19 nt, Artificial Sequence
  Description of Artificial Sequence: Synthetic oligonucleotide
uggauccugcuguucugag

SEQ ID NO: 2354 - RNA, 19 nt, Artificial Sequence
  Description of Artificial Sequence: Synthetic oligonucleotide
cuggauccugcuguucuga

SEQ ID NO: 2355 - RNA, 19 nt, Artificial Sequence
  Description of Artificial Sequence: Synthetic oligonucleotide
gcuggauccugcuguucug

SEQ ID NO: 2356 - RNA, 19 nt, Artificial Sequence
  Description of Artificial Sequence: Synthetic oligonucleotide
ugcuggauccugcuguucu

SEQ ID NO: 2357 - RNA, 19 nt, Artificial Sequence
  Description of Artificial Sequence: Synthetic oligonucleotide
uugcuggauccugcuguuc

SEQ ID NO: 2358 - RNA, 19 nt, Artificial Sequence
  Description of Artificial Sequence: Synthetic oligonucleotide
guugcuggauccugcuguu

SEQ ID NO: 2359 - RNA, 19 nt, Artificial Sequence
  Description of Artificial Sequence: Synthetic oligonucleotide
aguugcuggauccugcugu

SEQ ID NO: 2360 - RNA, 19 nt, Artificial Sequence
  Description of Artificial Sequence: Synthetic oligonucleotide
gaguugcuggauccugcug

SEQ ID NO: 2361 - RNA, 19 nt, Artificial Sequence
  Description of Artificial Sequence: Synthetic oligonucleotide
agaguugcuggauccugcu

SEQ ID NO: 2362 - RNA, 19 nt, Artificial Sequence
  Description of Artificial Sequence: Synthetic oligonucleotide
aagaguugcuggauccugc

SEQ ID NO: 2363 - RNA, 19 nt, Artificial Sequence
  Description of Artificial Sequence: Synthetic oligonucleotide
gaagaguugcuggauccug

SEQ ID NO: 2364 - RNA, 19 nt, Artificial Sequence
  Description of Artificial Sequence: Synthetic oligonucleotide
ggaagaguugcuggauccu

SEQ ID NO: 2365 - RNA, 19 nt, Artificial Sequence
  Description of Artificial Sequence: Synthetic oligonucleotide
uggaagaguugcuggaucc

SEQ ID NO: 2366 - RNA, 19 nt, Artificial Sequence
  Description of Artificial Sequence: Synthetic oligonucleotide
guggaagaguugcuggauc

SEQ ID NO: 2367 - RNA, 19 nt, Artificial Sequence
  Description of Artificial Sequence: Synthetic oligonucleotide
uguggaagaguugcuggau

SEQ ID NO: 2368 - RNA, 19 nt, Artificial Sequence
  Description of Artificial Sequence: Synthetic oligonucleotide
uuguggaagaguugcugga

SEQ ID NO: 2369 - RNA, 19 nt, Artificial Sequence
  Description of Artificial Sequence: Synthetic oligonucleotide
cuuguggaagaguugcugg

SEQ ID NO: 2370 - RNA, 19 nt, Artificial Sequence
  Description of Artificial Sequence: Synthetic oligonucleotide
ccuuguggaagaguugcug

SEQ ID NO: 2371 - RNA, 19 nt, Artificial Sequence
  Description of Artificial Sequence: Synthetic oligonucleotide
accuuguggaagaguugcu

SEQ ID NO: 2372 - RNA, 19 nt, Artificial Sequence
  Description of Artificial Sequence: Synthetic oligonucleotide
caccuuguggaagaguugc

SEQ ID NO: 2373 - RNA, 19 nt, Artificial Sequence
  Description of Artificial Sequence: Synthetic oligonucleotide
ccaccuuguggaagaguug

SEQ ID NO: 2374 - RNA, 19 nt, Artificial Sequence
  Description of Artificial Sequence: Synthetic oligonucleotide
gccaccuuguggaagaguu

SEQ ID NO: 2375 - RNA, 19 nt, Artificial Sequence
  Description of Artificial Sequence: Synthetic oligonucleotide
ggccaccuuguggaagagu

SEQ ID NO: 2376 - RNA, 19 nt, Artificial Sequence
  Description of Artificial Sequence: Synthetic oligonucleotide
gggccaccuuguggaagag

SEQ ID NO: 2377 - RNA, 19 nt, Artificial Sequence
  Description of Artificial Sequence: Synthetic oligonucleotide
ugggccaccuuguggaaga

SEQ ID NO: 2378 - RNA, 19 nt, Artificial Sequence
  Description of Artificial Sequence: Synthetic oligonucleotide
cugggccaccuuguggaag

SEQ ID NO: 2379 - RNA, 19 nt, Artificial Sequence
  Description of Artificial Sequence: Synthetic oligonucleotide
gcugggccaccuuguggaa

SEQ ID NO: 2380 - RNA, 19 nt, Artificial Sequence
  Description of Artificial Sequence: Synthetic oligonucleotide
ugcugggccaccuugugga

SEQ ID NO: 2381 - RNA, 19 nt, Artificial Sequence
  Description of Artificial Sequence: Synthetic oligonucleotide
cugcugggccaccuugugg

SEQ ID NO: 2382 - RNA, 19 nt, Artificial Sequence
  Description of Artificial Sequence: Synthetic oligonucleotide
gcugcugggccaccuugug

SEQ ID NO: 2383 - RNA, 19 nt, Artificial Sequence
  Description of Artificial Sequence: Synthetic oligonucleotide
ugcugcugggccaccuugu

SEQ ID NO: 2384 - RNA, 19 nt, Artificial Sequence
  Description of Artificial Sequence: Synthetic oligonucleotide
cugcugcugggccaccuug

SEQ ID NO: 2385 - RNA, 19 nt, Artificial Sequence
  Description of Artificial Sequence: Synthetic oligonucleotide
gcugcugcugggccaccuu

SEQ ID NO: 2386 - RNA, 19 nt, Artificial Sequence
  Description of Artificial Sequence: Synthetic oligonucleotide
cgcugcugcugggccaccu

SEQ ID NO: 2387 - RNA, 19 nt, Artificial Sequence
  Description of Artificial Sequence: Synthetic oligonucleotide
ccgcugcugcugggccacc

SEQ ID NO: 2388 - RNA, 19 nt, Artificial Sequence
  Description of Artificial Sequence: Synthetic oligonucleotide
gccgcugcugcugggccac

SEQ ID NO: 2389 - RNA, 19 nt, Artificial Sequence
  Description of Artificial Sequence: Synthetic oligonucleotide
ugccgcugcugcugggcca

SEQ ID NO: 2390 - RNA, 19 nt, Artificial Sequence
  Description of Artificial Sequence: Synthetic oligonucleotide
gugccgcugcugcugggcc

SEQ ID NO: 2391 - RNA, 19 nt, Artificial Sequence
  Description of Artificial Sequence: Synthetic oligonucleotide
ggugccgcugcugcugggc

SEQ ID NO: 2392 - RNA, 19 nt, Artificial Sequence
  Description of Artificial Sequence: Synthetic oligonucleotide
aggugccgcugcugcuggg

SEQ ID NO: 2393 - RNA, 19 nt, Artificial Sequence
  Description of Artificial Sequence: Synthetic oligonucleotide
caggugccgcugcugcugg

SEQ ID NO: 2394 - RNA, 19 nt, Artificial Sequence
  Description of Artificial Sequence: Synthetic oligonucleotide
ccaggugccgcugcugcug

SEQ ID NO: 2395 - RNA, 19 nt, Artificial Sequence
  Description of Artificial Sequence: Synthetic oligonucleotide
uccaggugccgcugcugcu

SEQ ID NO: 2396 - RNA, 19 nt, Artificial Sequence
  Description of Artificial Sequence: Synthetic oligonucleotide
cuccaggugccgcugcugc

SEQ ID NO: 2397 - RNA, 19 nt, Artificial Sequence
  Description of Artificial Sequence: Synthetic oligonucleotide
ucuccaggugccgcugcug

SEQ ID NO: 2398 - RNA, 19 nt, Artificial Sequence
  Description of Artificial Sequence: Synthetic oligonucleotide
uucuccaggugccgcugcu

SEQ ID NO: 2399 - RNA, 19 nt, Artificial Sequence
  Description of Artificial Sequence: Synthetic oligonucleotide
cuucuccaggugccgcugc

SEQ ID NO: 2400 - RNA, 19 nt, Artificial Sequence
  Description of Artificial Sequence: Synthetic oligonucleotide
gcuucuccaggugccgcug

SEQ ID NO: 2401 - RNA, 19 nt, Artificial Sequence
  Description of Artificial Sequence: Synthetic oligonucleotide
ugcuucuccaggugccgcu

SEQ ID NO: 2402 - RNA, 19 nt, Artificial Sequence
  Description of Artificial Sequence: Synthetic oligonucleotide
cugcuucuccaggugccgc

SEQ ID NO: 2403 - RNA, 19 nt, Artificial Sequence
  Description of Artificial Sequence: Synthetic oligonucleotide
gcugcuucuccaggugccg

SEQ ID NO: 2404 - RNA, 19 nt, Artificial Sequence
  Description of Artificial Sequence: Synthetic oligonucleotide
ugcugcuucuccaggugcc

SEQ ID NO: 2405 - RNA, 19 nt, Artificial Sequence
  Description of Artificial Sequence: Synthetic oligonucleotide
gugcugcuucuccaggugc

SEQ ID NO: 2406 - RNA, 19 nt, Artificial Sequence
  Description of Artificial Sequence: Synthetic oligonucleotide
ggugcugcuucuccaggug

SEQ ID NO: 2407 - RNA, 19 nt, Artificial Sequence
  Description of Artificial Sequence: Synthetic oligonucleotide
aggugcugcuucuccaggu

SEQ ID NO: 2408 - RNA, 19 nt, Artificial Sequence
  Description of Artificial Sequence: Synthetic oligonucleotide
caggugcugcuucuccagg

SEQ ID NO: 2409 - RNA, 19 nt, Artificial Sequence
  Description of Artificial Sequence: Synthetic oligonucleotide
gcaggugcugcuucuccag

SEQ ID NO: 2410 - RNA, 19 nt, Artificial Sequence
  Description of Artificial Sequence: Synthetic oligonucleotide
cgcaggugcugcuucucca

SEQ ID NO: 2411 - RNA, 19 nt, Artificial Sequence
  Description of Artificial Sequence: Synthetic oligonucleotide
ucgcaggugcugcuucucc

SEQ ID NO: 2412 - RNA, 19 nt, Artificial Sequence
  Description of Artificial Sequence: Synthetic oligonucleotide
uucgcaggugcugcuucuc

SEQ ID NO: 2413 - RNA, 19 nt, Artificial Sequence
  Description of Artificial Sequence: Synthetic oligonucleotide
auucgcaggugcugcuucu

SEQ ID NO: 2414 - RNA, 19 nt, Artificial Sequence
  Description of Artificial Sequence: Synthetic oligonucleotide
aauucgcaggugcugcuuc

SEQ ID NO: 2415 - RNA, 19 nt, Artificial Sequence
  Description of Artificial Sequence: Synthetic oligonucleotide
gaauucgcaggugcugcuu

SEQ ID NO: 2416 - RNA, 19 nt, Artificial Sequence
  Description of Artificial Sequence: Synthetic oligonucleotide
ugaauucgcaggugcugcu

SEQ ID NO: 2417 - RNA, 19 nt, Artificial Sequence
  Description of Artificial Sequence: Synthetic oligonucleotide
cugaauucgcaggugcugc

SEQ ID NO: 2418 - RNA, 19 nt, Artificial Sequence
  Description of Artificial Sequence: Synthetic oligonucleotide
gcugaauucgcaggugcug

SEQ ID NO: 2419 - RNA, 19 nt, Artificial Sequence
  Description of Artificial Sequence: Synthetic oligonucleotide
ugcugaauucgcaggugcu

SEQ ID NO: 2420 - RNA, 19 nt, Artificial Sequence
  Description of Artificial Sequence: Synthetic oligonucleotide
augcugaauucgcaggugc

SEQ ID NO: 2421 - RNA, 19 nt, Artificial Sequence
  Description of Artificial Sequence: Synthetic oligonucleotide
gaugcugaauucgcaggug

SEQ ID NO: 2422 - RNA, 19 nt, Artificial Sequence
  Description of Artificial Sequence: Synthetic oligonucleotide
agaugcugaauucgcaggu

SEQ ID NO: 2423 - RNA, 19 nt, Artificial Sequence
  Description of Artificial Sequence: Synthetic oligonucleotide
cagaugcugaauucgcagg

SEQ ID NO: 2424 - RNA, 19 nt, Artificial Sequence
  Description of Artificial Sequence: Synthetic oligonucleotide
gcagaugcugaauucgcag

SEQ ID NO: 2425 - RNA, 19 nt, Artificial Sequence
  Description of Artificial Sequence: Synthetic oligonucleotide
ugcagaugcugaauucgca

SEQ ID NO: 2426 - RNA, 19 nt, Artificial Sequence
  Description of Artificial Sequence: Synthetic oligonucleotide
uugcagaugcugaauucgc

SEQ ID NO: 2427 - RNA, 19 nt, Artificial Sequence
  Description of Artificial Sequence: Synthetic oligonucleotide
uuugcagaugcugaauucg

SEQ ID NO: 2428 - RNA, 19 nt, Artificial Sequence
  Description of Artificial Sequence: Synthetic oligonucleotide
cuuugcagaugcugaauuc

SEQ ID NO: 2429 - RNA, 19 nt, Artificial Sequence
  Description of Artificial Sequence: Synthetic oligonucleotide
gcuuugcagaugcugaauu

SEQ ID NO: 2430 - RNA, 19 nt, Artificial Sequence
  Description of Artificial Sequence: Synthetic oligonucleotide
ggcuuugcagaugcugaau

SEQ ID NO: 2431 - RNA, 19 nt, Artificial Sequence
  Description of Artificial Sequence: Synthetic oligonucleotide
uggcuuugcagaugcugaa

SEQ ID NO: 2432 - RNA, 19 nt, Artificial Sequence
  Description of Artificial Sequence: Synthetic oligonucleotide
cuggcuuugcagaugcuga

SEQ ID NO: 2433 - RNA, 19 nt, Artificial Sequence
  Description of Artificial Sequence: Synthetic oligonucleotide
acuggcuuugcagaugcug

SEQ ID NO: 2434 - RNA, 19 nt, Artificial Sequence
  Description of Artificial Sequence: Synthetic oligonucleotide
aacuggcuuugcagaugcu

SEQ ID NO: 2435 - RNA, 19 nt, Artificial Sequence
  Description of Artificial Sequence: Synthetic oligonucleotide
aaacuggcuuugcagaugc

SEQ ID NO: 2436 - RNA, 19 nt, Artificial Sequence
  Description of Artificial Sequence: Synthetic oligonucleotide
caaacuggcuuugcagaug

SEQ ID NO: 2437 - RNA, 19 nt, Artificial Sequence
  Description of Artificial Sequence: Synthetic oligonucleotide
ccaaacuggcuuugcagau

SEQ ID NO: 2438 - RNA, 19 nt, Artificial Sequence
  Description of Artificial Sequence: Synthetic oligonucleotide
gccaaacuggcuuugcaga

SEQ ID NO: 2439 - RNA, 19 nt, Artificial Sequence
  Description of Artificial Sequence: Synthetic oligonucleotide
ggccaaacuggcuuugcag

SEQ ID NO: 2440 - RNA, 19 nt, Artificial Sequence
  Description of Artificial Sequence: Synthetic oligonucleotide
aggccaaacuggcuuugca

SEQ ID NO: 2441 - RNA, 19 nt, Artificial Sequence
  Description of Artificial Sequence: Synthetic oligonucleotide
gaggccaaacuggcuuugc

SEQ ID NO: 2442 - RNA, 19 nt, Artificial Sequence
  Description of Artificial Sequence: Synthetic oligonucleotide
ggaggccaaacuggcuuug

SEQ ID NO: 2443 - RNA, 19 nt, Artificial Sequence
  Description of Artificial Sequence: Synthetic oligonucleotide
aggaggccaaacuggcuuu

SEQ ID NO: 2444 - RNA, 19 nt, Artificial Sequence
  Description of Artificial Sequence: Synthetic oligonucleotide
caggaggccaaacuggcuu

SEQ ID NO: 2445 - RNA, 19 nt, Artificial Sequence
  Description of Artificial Sequence: Synthetic oligonucleotide
ccaggaggccaaacuggcu

SEQ ID NO: 2446 - RNA, 19 nt, Artificial Sequence
  Description of Artificial Sequence: Synthetic oligonucleotide
uccaggaggccaaacuggc

SEQ ID NO: 2447 - RNA, 19 nt, Artificial Sequence
  Description of Artificial Sequence: Synthetic oligonucleotide
guccaggaggccaaacugg

SEQ ID NO: 2448 - RNA, 19 nt, Artificial Sequence
  Description of Artificial Sequence: Synthetic oligonucleotide
gguccaggaggccaaacug

SEQ ID NO: 2449 - RNA, 19 nt, Artificial Sequence
  Description of Artificial Sequence: Synthetic oligonucleotide
ugguccaggaggccaaacu

SEQ ID NO: 2450 - RNA, 19 nt, Artificial Sequence
  Description of Artificial Sequence: Synthetic oligonucleotide
gugguccaggaggccaaac

SEQ ID NO: 2451 - RNA, 19 nt, Artificial Sequence
  Description of Artificial Sequence: Synthetic oligonucleotide
ugugguccaggaggccaaa

SEQ ID NO: 2452 - RNA, 19 nt, Artificial Sequence
  Description of Artificial Sequence: Synthetic oligonucleotide
uugugguccaggaggccaa

SEQ ID NO: 2453 - RNA, 19 nt, Artificial Sequence
  Description of Artificial Sequence: Synthetic oligonucleotide
cuugugguccaggaggcca

SEQ ID NO: 2454 - RNA, 19 nt, Artificial Sequence
  Description of Artificial Sequence: Synthetic oligonucleotide
gcuugugguccaggaggcc

SEQ ID NO: 2455 - RNA, 19 nt, Artificial Sequence
  Description of Artificial Sequence: Synthetic oligonucleotide
ugcuugugguccaggaggc

SEQ ID NO: 2456 - RNA, 19 nt, Artificial Sequence
  Description of Artificial Sequence: Synthetic oligonucleotide
gugcuugugguccaggagg

SEQ ID NO: 2457 - RNA, 19 nt, Artificial Sequence
  Description of Artificial Sequence: Synthetic oligonucleotide
ggugcuugugguccaggag

SEQ ID NO: 2458 - RNA, 19 nt, Artificial Sequence
  Description of Artificial Sequence: Synthetic oligonucleotide
aggugcuugugguccagga

SEQ ID NO: 2459 - RNA, 19 nt, Artificial Sequence
  Description of Artificial Sequence: Synthetic oligonucleotide
uaggugcuugugguccagg

SEQ ID NO: 2460 - RNA, 19 nt, Artificial Sequence
  Description of Artificial Sequence: Synthetic oligonucleotide
cuaggugcuugugguccag

SEQ ID NO: 2461 - RNA, 19 nt, Artificial Sequence
  Description of Artificial Sequence: Synthetic oligonucleotide
ucuaggugcuuguggucca

SEQ ID NO: 2462 - RNA, 19 nt, Artificial Sequence
  Description of Artificial Sequence: Synthetic oligonucleotide
gucuaggugcuuguggucc

SEQ ID NO: 2463 - RNA, 19 nt, Artificial Sequence
  Description of Artificial Sequence: Synthetic oligonucleotide
ggucuaggugcuugugguc

SEQ ID NO: 2464 - RNA, 19 nt, Artificial Sequence
  Description of Artificial Sequence: Synthetic oligonucleotide
uggucuaggugcuuguggu

SEQ ID NO: 2465 - RNA, 19 nt, Artificial Sequence
  Description of Artificial Sequence: Synthetic oligonucleotide
auggucuaggugcuugugg

SEQ ID NO: 2466 - RNA, 19 nt, Artificial Sequence
  Description of Artificial Sequence: Synthetic oligonucleotide
cauggucuaggugcuugug

SEQ ID NO: 2467 - RNA, 19 nt, Artificial Sequence
  Description of Artificial Sequence: Synthetic oligonucleotide
ucauggucuaggugcuugu

SEQ ID NO: 2468 - RNA, 19 nt, Artificial Sequence
  Description of Artificial Sequence: Synthetic oligonucleotide
cucauggucuaggugcuug

SEQ ID NO: 2469 - RNA, 19 nt, Artificial Sequence
  Description of Artificial Sequence: Synthetic oligonucleotide
ccucauggucuaggugcuu

SEQ ID NO: 2470 - RNA, 19 nt, Artificial Sequence
  Description of Artificial Sequence: Synthetic oligonucleotide
accucauggucuaggugcu

SEQ ID NO: 2471 - RNA, 19 nt, Artificial Sequence
  Description of Artificial Sequence: Synthetic oligonucleotide
caccucauggucuaggugc

SEQ ID NO: 2472 - RNA, 19 nt, Artificial Sequence
  Description of Artificial Sequence: Synthetic oligonucleotide
ccaccucauggucuaggug

SEQ ID NO: 2473 - RNA, 19 nt, Artificial Sequence
  Description of Artificial Sequence: Synthetic oligonucleotide
gccaccucauggucuaggu

SEQ ID NO: 2474 - RNA, 19 nt, Artificial Sequence
  Description of Artificial Sequence: Synthetic oligonucleotide
ggccaccucauggucuagg

SEQ ID NO: 2475 - RNA, 19 nt, Artificial Sequence
  Description of Artificial Sequence: Synthetic oligonucleotide
uggccaccucauggucuag

SEQ ID NO: 2476 - RNA, 19 nt, Artificial Sequence
  Description of Artificial Sequence: Synthetic oligonucleotide
uuggccaccucauggucua

SEQ ID NO: 2477 - RNA, 19 nt, Artificial Sequence
  Description of Artificial Sequence: Synthetic oligonucleotide
cuuggccaccucauggucu

SEQ ID NO: 2478 - RNA, 19 nt, Artificial Sequence
  Description of Artificial Sequence: Synthetic oligonucleotide
gcuuggccaccucaugguc

SEQ ID NO: 2479 - RNA, 19 nt, Artificial Sequence
  Description of Artificial Sequence: Synthetic oligonucleotide
ggcuuggccaccucauggu

SEQ ID NO: 2480 - RNA, 19 nt, Artificial Sequence
  Description of Artificial Sequence: Synthetic oligonucleotide
aggcuuggccaccucaugg

SEQ ID NO: 2481 - RNA, 19 nt, Artificial Sequence
  Description of Artificial Sequence: Synthetic oligonucleotide
caggcuuggccaccucaug

SEQ ID NO: 2482 - RNA, 19 nt, Artificial Sequence
  Description of Artificial Sequence: Synthetic oligonucleotide
gcaggcuuggccaccucau

SEQ ID NO: 2483 - RNA, 19 nt, Artificial Sequence
  Description of Artificial Sequence: Synthetic oligonucleotide
ggcaggcuuggccaccuca

SEQ ID NO: 2484 - RNA, 19 nt, Artificial Sequence
  Description of Artificial Sequence: Synthetic oligonucleotide
gggcaggcuuggccaccuc

SEQ ID NO: 2485 - RNA, 19 nt, Artificial Sequence
  Description of Artificial Sequence: Synthetic oligonucleotide
cgggcaggcuuggccaccu

SEQ ID NO: 2486 - RNA, 19 nt, Artificial Sequence
  Description of Artificial Sequence: Synthetic oligonucleotide
ucgggcaggcuuggccacc

SEQ ID NO: 2487 - RNA, 19 nt, Artificial Sequence
  Description of Artificial Sequence: Synthetic oligonucleotide
uucgggcaggcuuggccac

SEQ ID NO: 2488 - RNA, 19 nt, Artificial Sequence
  Description of Artificial Sequence: Synthetic oligonucleotide
cuucgggcaggcuuggcca

SEQ ID NO: 2489 - RNA, 19 nt, Artificial Sequence
  Description of Artificial Sequence: Synthetic oligonucleotide
ucuucgggcaggcuuggcc

SEQ ID NO: 2490 - RNA, 19 nt, Artificial Sequence
  Description of Artificial Sequence: Synthetic oligonucleotide
uucuucgggcaggcuuggc

SEQ ID NO: 2491 - RNA, 19 nt, Artificial Sequence
  Description of Artificial Sequence: Synthetic oligonucleotide
uuucuucgggcaggcuugg

SEQ ID NO: 2492 - RNA, 19 nt, Artificial Sequence
  Description of Artificial Sequence: Synthetic oligonucleotide
cuuucuucgggcaggcuug

SEQ ID NO: 2493 - RNA, 19 nt, Artificial Sequence
  Description of Artificial Sequence: Synthetic oligonucleotide
ucuuucuucgggcaggcuu

SEQ ID NO: 2494 - RNA, 19 nt, Artificial Sequence
  Description of Artificial Sequence: Synthetic oligonucleotide
cucuuucuucgggcaggcu

SEQ ID NO: 2495 - RNA, 19 nt, Artificial Sequence
  Description of Artificial Sequence: Synthetic oligonucleotide
ccucuuucuucgggcaggc

SEQ ID NO: 2496 - RNA, 19 nt, Artificial Sequence
  Description of Artificial Sequence: Synthetic oligonucleotide
gccucuuucuucgggcagg

SEQ ID NO: 2497 - RNA, 19 nt, Artificial Sequence
  Description of Artificial Sequence: Synthetic oligonucleotide
agccucuuucuucgggcag

SEQ ID NO: 2498 - RNA, 19 nt, Artificial Sequence
  Description of Artificial Sequence: Synthetic oligonucleotide
cagccucuuucuucgggca

SEQ ID NO: 2499 - RNA, 19 nt, Artificial Sequence
  Description of Artificial Sequence: Synthetic oligonucleotide
gcagccucuuucuucgggc

SEQ ID NO: 2500 - RNA, 19 nt, Artificial Sequence
  Description of Artificial Sequence: Synthetic oligonucleotide
ggcagccucuuucuucggg

SEQ ID NO: 2501 - RNA, 19 nt, Artificial Sequence
  Description of Artificial Sequence: Synthetic oligonucleotide
gggcagccucuuucuucgg

SEQ ID NO: 2502 - RNA, 19 nt, Artificial Sequence
  Description of Artificial Sequence: Synthetic oligonucleotide
cgggcagccucuuucuucg

SEQ ID NO: 2503 - RNA, 19 nt, Artificial Sequence
  Description of Artificial Sequence: Synthetic oligonucleotide
ucgggcagccucuuucuuc

SEQ ID NO: 2504 - RNA, 19 nt, Artificial Sequence
  Description of Artificial Sequence: Synthetic oligonucleotide
cucgggcagccucuuucuu

SEQ ID NO: 2505 - RNA, 19 nt, Artificial Sequence
  Description of Artificial Sequence: Synthetic oligonucleotide
ucucgggcagccucuuucu

SEQ ID NO: 2506 - RNA, 19 nt, Artificial Sequence
  Description of Artificial Sequence: Synthetic oligonucleotide
aucucgggcagccucuuuc

SEQ ID NO: 2507 - RNA, 19 nt, Artificial Sequence
  Description of Artificial Sequence: Synthetic oligonucleotide
caucucgggcagccucuuu

SEQ ID NO: 2508 - RNA, 19 nt, Artificial Sequence
  Description of Artificial Sequence: Synthetic oligonucleotide
ccaucucgggcagccucuu

SEQ ID NO: 2509 - RNA, 19 nt, Artificial Sequence
  Description of Artificial Sequence: Synthetic oligonucleotide
gccaucucgggcagccucu

SEQ ID NO: 2510 - RNA, 19 nt, Artificial Sequence
  Description of Artificial Sequence: Synthetic oligonucleotide
ggccaucucgggcagccuc

SEQ ID NO: 2511 - RNA, 19 nt, Artificial Sequence
  Description of Artificial Sequence: Synthetic oligonucleotide
gggccaucucgggcagccu

SEQ ID NO: 2512 - RNA, 19 nt, Artificial Sequence
  Description of Artificial Sequence: Synthetic oligonucleotide
ugggccaucucgggcagcc

SEQ ID NO: 2513 - RNA, 19 nt, Artificial Sequence
  Description of Artificial Sequence: Synthetic oligonucleotide
cugggccaucucgggcagc

SEQ ID NO: 2514 - RNA, 19 nt, Artificial Sequence
  Description of Artificial Sequence: Synthetic oligonucleotide
gcugggccaucucgggcag

SEQ ID NO: 2515 - RNA, 19 nt, Artificial Sequence
  Description of Artificial Sequence: Synthetic oligonucleotide
ggcugggccaucucgggca

SEQ ID NO: 2516 - RNA, 19 nt, Artificial Sequence
  Description of Artificial Sequence: Synthetic oligonucleotide
uggcugggccaucucgggc

SEQ ID NO: 2517 - RNA, 19 nt, Artificial Sequence
  Description of Artificial Sequence: Synthetic oligonucleotide
cuggcugggccaucucggg

SEQ ID NO: 2518 - RNA, 19 nt, Artificial Sequence
  Description of Artificial Sequence: Synthetic oligonucleotide
acuggcugggccaucucgg

SEQ ID NO: 2519 - RNA, 19 nt, Artificial Sequence
  Description of Artificial Sequence: Synthetic oligonucleotide
aacuggcugggccaucucg

SEQ ID NO: 2520 - RNA, 19 nt, Artificial Sequence
  Description of Artificial Sequence: Synthetic oligonucleotide
caacuggcugggccaucuc

SEQ ID NO: 2521 - RNA, 19 nt, Artificial Sequence
  Description of Artificial Sequence: Synthetic oligonucleotide
ucaacuggcugggccaucu

SEQ ID NO: 2522 - RNA, 19 nt, Artificial Sequence
  Description of Artificial Sequence: Synthetic oligonucleotide
gucaacuggcugggccauc

SEQ ID NO: 2523 - RNA, 19 nt, Artificial Sequence
  Description of Artificial Sequence: Synthetic oligonucleotide
ggucaacuggcugggccau

SEQ ID NO: 2524 - RNA, 19 nt, Artificial Sequence
  Description of Artificial Sequence: Synthetic oligonucleotide
gggucaacuggcugggcca

SEQ ID NO: 2525 - RNA, 19 nt, Artificial Sequence
  Description of Artificial Sequence: Synthetic oligonucleotide
cgggucaacuggcugggcc

SEQ ID NO: 2526 - RNA, 19 nt, Artificial Sequence
  Description of Artificial Sequence: Synthetic oligonucleotide
ccgggucaacuggcugggc

SEQ ID NO: 2527 - RNA, 19 nt, Artificial Sequence
  Description of Artificial Sequence: Synthetic oligonucleotide
gccgggucaacuggcuggg

SEQ ID NO: 2528 - RNA, 19 nt, Artificial Sequence
  Description of Artificial Sequence: Synthetic oligonucleotide
agccgggucaacuggcugg

SEQ ID NO: 2529 - RNA, 19 nt, Artificial Sequence
  Description of Artificial Sequence: Synthetic oligonucleotide
gagccgggucaacuggcug

SEQ ID NO: 2530 - RNA, 19 nt, Artificial Sequence
  Description of Artificial Sequence: Synthetic oligonucleotide
ugagccgggucaacuggcu

SEQ ID NO: 2531 - RNA, 19 nt, Artificial Sequence
  Description of Artificial Sequence: Synthetic oligonucleotide
gugagccgggucaacuggc

SEQ ID NO: 2532 - RNA, 19 nt, Artificial Sequence
  Description of Artificial Sequence: Synthetic oligonucleotide
ugugagccgggucaacugg

SEQ ID NO: 2533 - RNA, 19 nt, Artificial Sequence
  Description of Artificial Sequence: Synthetic oligonucleotide
uugugagccgggucaacug

SEQ ID NO: 2534 - RNA, 19 nt, Artificial Sequence
  Description of Artificial Sequence: Synthetic oligonucleotide
auugugagccgggucaacu

SEQ ID NO: 2535 - RNA, 19 nt, Artificial Sequence
  Description of Artificial Sequence: Synthetic oligonucleotide
cauugugagccgggucaac

SEQ ID NO: 2536 - RNA, 19 nt, Artificial Sequence
  Description of Artificial Sequence: Synthetic oligonucleotide
acauugugagccgggucaa

SEQ ID NO: 2537 - RNA, 19 nt, Artificial Sequence
  Description of Artificial Sequence: Synthetic oligonucleotide
gacauugugagccggguca

SEQ ID NO: 2538 - RNA, 19 nt, Artificial Sequence
  Description of Artificial Sequence: Synthetic oligonucleotide
ugacauugugagccggguc

SEQ ID NO: 2539 - RNA, 19 nt, Artificial Sequence
  Description of Artificial Sequence: Synthetic oligonucleotide
cugacauugugagccgggu

SEQ ID NO: 2540 - RNA, 19 nt, Artificial Sequence
  Description of Artificial Sequence: Synthetic oligonucleotide
gcugacauugugagccggg

SEQ ID NO: 2541 - RNA, 19 nt, Artificial Sequence
  Description of Artificial Sequence: Synthetic oligonucleotide
ggcugacauugugagccgg

SEQ ID NO: 2542 - RNA, 19 nt, Artificial Sequence
  Description of Artificial Sequence: Synthetic oligonucleotide
cggcugacauugugagccg

SEQ ID NO: 2543 - RNA, 19 nt, Artificial Sequence
  Description of Artificial Sequence: Synthetic oligonucleotide
gcggcugacauugugagcc

SEQ ID NO: 2544 - RNA, 19 nt, Artificial Sequence
  Description of Artificial Sequence: Synthetic oligonucleotide
ggcggcugacauugugagc

SEQ ID NO: 2545 - RNA, 19 nt, Artificial Sequence
  Description of Artificial Sequence: Synthetic oligonucleotide
aggcggcugacauugugag

SEQ ID NO: 2546 - RNA, 19 nt, Artificial Sequence
  Description of Artificial Sequence: Synthetic oligonucleotide
caggcggcugacauuguga

SEQ ID NO: 2547 - RNA, 19 nt, Artificial Sequence
  Description of Artificial Sequence: Synthetic oligonucleotide
gcaggcggcugacauugug

SEQ ID NO: 2548 - RNA, 19 nt, Artificial Sequence
  Description of Artificial Sequence: Synthetic oligonucleotide
ugcaggcggcugacauugu

SEQ ID NO: 2549 - RNA, 19 nt, Artificial Sequence
  Description of Artificial Sequence: Synthetic oligonucleotide
gugcaggcggcugacauug

SEQ ID NO: 2550 - RNA, 19 nt, Artificial Sequence
  Description of Artificial Sequence: Synthetic oligonucleotide
ggugcaggcggcugacauu

SEQ ID NO: 2551 - RNA, 19 nt, Artificial Sequence
  Description of Artificial Sequence: Synthetic oligonucleotide
cggugcaggcggcugacau

SEQ ID NO: 2552 - RNA, 19 nt, Artificial Sequence
  Description of Artificial Sequence: Synthetic oligonucleotide
ccggugcaggcggcugaca

SEQ ID NO: 2553 - RNA, 19 nt, Artificial Sequence
  Description of Artificial Sequence: Synthetic oligonucleotide
gccggugcaggcggcugac

SEQ ID NO: 2554 - RNA, 19 nt, Artificial Sequence
  Description of Artificial Sequence: Synthetic oligonucleotide
agccggugcaggcggcuga

SEQ ID NO: 2555 - RNA, 19 nt, Artificial Sequence
  Description of Artificial Sequence: Synthetic oligonucleotide
cagccggugcaggcggcug

SEQ ID NO: 2556 - RNA, 19 nt, Artificial Sequence
  Description of Artificial Sequence: Synthetic oligonucleotide
gcagccggugcaggcggcu

SEQ ID NO: 2557 - RNA, 19 nt, Artificial Sequence
  Description of Artificial Sequence: Synthetic oligonucleotide
ggcagccggugcaggcggc

SEQ ID NO: 2558 - RNA, 19 nt, Artificial Sequence
  Description of Artificial Sequence: Synthetic oligonucleotide
gggcagccggugcaggcgg

SEQ ID NO: 2559 - RNA, 19 nt, Artificial Sequence
  Description of Artificial Sequence: Synthetic oligonucleotide
ugggcagccggugcaggcg

SEQ ID NO: 2560 - RNA, 19 nt, Artificial Sequence
  Description of Artificial Sequence: Synthetic oligonucleotide
cugggcagccggugcaggc

SEQ ID NO: 2561 - RNA, 19 nt, Artificial Sequence
  Description of Artificial Sequence: Synthetic oligonucleotide
ccugggcagccggugcagg

SEQ ID NO: 2562 - RNA, 19 nt, Artificial Sequence
  Description of Artificial Sequence: Synthetic oligonucleotide
cccugggcagccggugcag

SEQ ID NO: 2563 - RNA, 19 nt, Artificial Sequence
  Description of Artificial Sequence: Synthetic oligonucleotide
ucccugggcagccggugca

SEQ ID NO: 2564 - RNA, 19 nt, Artificial Sequence
  Description of Artificial Sequence: Synthetic oligonucleotide
aucccugggcagccggugc

SEQ ID NO: 2565 - RNA, 19 nt, Artificial Sequence
  Description of Artificial Sequence: Synthetic oligonucleotide
aaucccugggcagccggug

SEQ ID NO: 2566 - RNA, 19 nt, Artificial Sequence
  Description of Artificial Sequence: Synthetic oligonucleotide
caaucccugggcagccggu

SEQ ID NO: 2567 - RNA, 19 nt, Artificial Sequence
  Description of Artificial Sequence: Synthetic oligonucleotide
gcaaucccugggcagccgg

SEQ ID NO: 2568 - RNA, 19 nt, Artificial Sequence
  Description of Artificial Sequence: Synthetic oligonucleotide
ggcaaucccugggcagccg

SEQ ID NO: 2569 - RNA, 19 nt, Artificial Sequence
  Description of Artificial Sequence: Synthetic oligonucleotide
uggcaaucccugggcagcc

SEQ ID NO: 2570 - RNA, 19 nt, Artificial Sequence
  Description of Artificial Sequence: Synthetic oligonucleotide
cuggcaaucccugggcagc

SEQ ID NO: 2571 - RNA, 19 nt, Artificial Sequence
  Description of Artificial Sequence: Synthetic oligonucleotide
ccuggcaaucccugggcag

SEQ ID NO: 2572 - RNA, 19 nt, Artificial Sequence
  Description of Artificial Sequence: Synthetic oligonucleotide
uccuggcaaucccugggca

SEQ ID NO: 2573 - RNA, 19 nt, Artificial Sequence
  Description of Artificial Sequence: Synthetic oligonucleotide
cuccuggcaaucccugggc

SEQ ID NO: 2574 - RNA, 19 nt, Artificial Sequence
  Description of Artificial Sequence: Synthetic oligonucleotide
gcuccuggcaaucccuggg

SEQ ID NO: 2575 - RNA, 19 nt, Artificial Sequence
  Description of Artificial Sequence: Synthetic oligonucleotide
agcuccuggcaaucccugg

SEQ ID NO: 2576 - RNA, 19 nt, Artificial Sequence
  Description of Artificial Sequence: Synthetic oligonucleotide
cagcuccuggcaaucccug

SEQ ID NO: 2577 - RNA, 19 nt, Artificial Sequence
  Description of Artificial Sequence: Synthetic oligonucleotide
acagcuccuggcaaucccu

SEQ ID NO: 2578 - RNA, 19 nt, Artificial Sequence
  Description of Artificial Sequence: Synthetic oligonucleotide
aacagcuccuggcaauccc

SEQ ID NO: 2579 - RNA, 19 nt, Artificial Sequence
  Description of Artificial Sequence: Synthetic oligonucleotide
gaacagcuccuggcaaucc

SEQ ID NO: 2580 - RNA, 19 nt, Artificial Sequence
  Description of Artificial Sequence: Synthetic oligonucleotide
ggaacagcuccuggcaauc

SEQ ID NO: 2581 - RNA, 19 nt, Artificial Sequence
  Description of Artificial Sequence: Synthetic oligonucleotide
uggaacagcuccuggcaau

SEQ ID NO: 2582 - RNA, 19 nt, Artificial Sequence
  Description of Artificial Sequence: Synthetic oligonucleotide
cuggaacagcuccuggcaa

SEQ ID NO: 2583 - RNA, 19 nt, Artificial Sequence
  Description of Artificial Sequence: Synthetic oligonucleotide
ccuggaacagcuccuggca

SEQ ID NO: 2584 - RNA, 19 nt, Artificial Sequence
  Description of Artificial Sequence: Synthetic oligonucleotide
accuggaacagcuccuggc

SEQ ID NO: 2585 - RNA, 19 nt, Artificial Sequence
  Description of Artificial Sequence: Synthetic oligonucleotide
aaccuggaacagcuccugg

SEQ ID NO: 2586 - RNA, 19 nt, Artificial Sequence
  Description of Artificial Sequence: Synthetic oligonucleotide
caaccuggaacagcuccug

SEQ ID NO: 2587 - RNA, 19 nt, Artificial Sequence
  Description of Artificial Sequence: Synthetic oligonucleotide
ccaaccuggaacagcuccu

SEQ ID NO: 2588 - RNA, 19 nt, Artificial Sequence
  Description of Artificial Sequence: Synthetic oligonucleotide
cccaaccuggaacagcucc

SEQ ID NO: 2589 - RNA, 19 nt, Artificial Sequence
  Description of Artificial Sequence: Synthetic oligonucleotide
ccccaaccuggaacagcuc

SEQ ID NO: 2590 - RNA, 19 nt, Artificial Sequence
  Description of Artificial Sequence: Synthetic oligonucleotide
uccccaaccuggaacagcu

SEQ ID NO: 2591 - RNA, 19 nt, Artificial Sequence
  Description of Artificial Sequence: Synthetic oligonucleotide
cuccccaaccuggaacagc

SEQ ID NO: 2592 - RNA, 19 nt, Artificial Sequence
  Description of Artificial Sequence: Synthetic oligonucleotide
ucuccccaaccuggaacag

SEQ ID NO: 2593 - RNA, 19 nt, Artificial Sequence
  Description of Artificial Sequence: Synthetic oligonucleotide
cucuccccaaccuggaaca

SEQ ID NO: 2594 - RNA, 19 nt, Artificial Sequence
  Description of Artificial Sequence: Synthetic oligonucleotide
ccucuccccaaccuggaac

SEQ ID NO: 2595 - RNA, 19 nt, Artificial Sequence
  Description of Artificial Sequence: Synthetic oligonucleotide
gccucuccccaaccuggaa

SEQ ID NO: 2596 - RNA, 19 nt, Artificial Sequence
  Description of Artificial Sequence: Synthetic oligonucleotide
ugccucuccccaaccugga

SEQ ID NO: 2597 - RNA, 19 nt, Artificial Sequence
  Description of Artificial Sequence: Synthetic oligonucleotide
cugccucuccccaaccugg

SEQ ID NO: 2598 - RNA, 19 nt, Artificial Sequence
  Description of Artificial Sequence: Synthetic oligonucleotide
ucugccucuccccaaccug

SEQ ID NO: 2599 - RNA, 19 nt, Artificial Sequence
  Description of Artificial Sequence: Synthetic oligonucleotide
cucugccucuccccaaccu

SEQ ID NO: 2600 - RNA, 19 nt, Artificial Sequence
  Description of Artificial Sequence: Synthetic oligonucleotide
acucugccucuccccaacc

SEQ ID NO: 2601 - RNA, 19 nt, Artificial Sequence
  Description of Artificial Sequence: Synthetic oligonucleotide
cacucugccucuccccaac

SEQ ID NO: 2602 - RNA, 19 nt, Artificial Sequence
  Description of Artificial Sequence: Synthetic oligonucleotide
ccacucugccucuccccaa

SEQ ID NO: 2603 - RNA, 19 nt, Artificial Sequence
  Description of Artificial Sequence: Synthetic oligonucleotide
uccacucugccucucccca

SEQ ID NO: 2604 - RNA, 19 nt, Artificial Sequence
  Description of Artificial Sequence: Synthetic oligonucleotide
guccacucugccucucccc

SEQ ID NO: 2605 - RNA, 19 nt, Artificial Sequence
  Description of Artificial Sequence: Synthetic oligonucleotide
aguccacucugccucuccc

SEQ ID NO: 2606 - RNA, 19 nt, Artificial Sequence
  Description of Artificial Sequence: Synthetic oligonucleotide
uaguccacucugccucucc

SEQ ID NO: 2607 - RNA, 19 nt, Artificial Sequence
  Description of Artificial Sequence: Synthetic oligonucleotide
auaguccacucugccucuc

SEQ ID NO: 2608 - RNA, 19 nt, Artificial Sequence
  Description of Artificial Sequence: Synthetic oligonucleotide
aauaguccacucugccucu

SEQ ID NO: 2609 - RNA, 19 nt, Artificial Sequence
  Description of Artificial Sequence: Synthetic oligonucleotide
aaauaguccacucugccuc

SEQ ID NO: 2610 - RNA, 19 nt, Artificial Sequence
  Description of Artificial Sequence: Synthetic oligonucleotide
caaauaguccacucugccu

SEQ ID NO: 2611 - RNA, 19 nt, Artificial Sequence
  Description of Artificial Sequence: Synthetic oligonucleotide
ucaaauaguccacucugcc

SEQ ID NO: 2612 - RNA, 19 nt, Artificial Sequence
  Description of Artificial Sequence: Synthetic oligonucleotide
uucaaauaguccacucugc

SEQ ID NO: 2613 - RNA, 19 nt, Artificial Sequence
  Description of Artificial Sequence: Synthetic oligonucleotide
uuucaaauaguccacucug

SEQ ID NO: 2614 - RNA, 19 nt, Artificial Sequence
  Description of Artificial Sequence: Synthetic oligonucleotide
auuucaaauaguccacucu

SEQ ID NO: 2615 - RNA, 19 nt, Artificial Sequence
  Description of Artificial Sequence: Synthetic oligonucleotide
gauuucaaauaguccacuc

SEQ ID NO: 2616 - RNA, 19 nt, Artificial Sequence
  Description of Artificial Sequence: Synthetic oligonucleotide
ggauuucaaauaguccacu

SEQ ID NO: 2617 - RNA, 19 nt, Artificial Sequence
  Description of Artificial Sequence: Synthetic oligonucleotide
uggauuucaaauaguccac

SEQ ID NO: 2618 - RNA, 19 nt, Artificial Sequence
  Description of Artificial Sequence: Synthetic oligonucleotide
cuggauuucaaauagucca

SEQ ID NO: 2619 - RNA, 19 nt, Artificial Sequence
  Description of Artificial Sequence: Synthetic oligonucleotide
gcuggauuucaaauagucc

SEQ ID NO: 2620 - RNA, 19 nt, Artificial Sequence
  Description of Artificial Sequence: Synthetic oligonucleotide
ggcuggauuucaaauaguc

SEQ ID NO: 2621 - RNA, 19 nt, Artificial Sequence
  Description of Artificial Sequence: Synthetic oligonucleotide
aggcuggauuucaaauagu

SEQ ID NO: 2622 - RNA, 19 nt, Artificial Sequence
  Description of Artificial Sequence: Synthetic oligonucleotide
gaggcuggauuucaaauag

SEQ ID NO: 2623 - RNA, 19 nt, Artificial Sequence
  Description of Artificial Sequence: Synthetic oligonucleotide
ugaggcuggauuucaaaua

SEQ ID NO: 2624 - RNA, 19 nt, Artificial Sequence
  Description of Artificial Sequence: Synthetic oligonucleotide
cugaggcuggauuucaaau

SEQ ID NO: 2625 - RNA, 19 nt, Artificial Sequence
  Description of Artificial Sequence: Synthetic oligonucleotide
ccugaggcuggauuucaaa

SEQ ID NO: 2626 - RNA, 19 nt, Artificial Sequence
  Description of Artificial Sequence: Synthetic oligonucleotide
cccugaggcuggauuucaa

SEQ ID NO: 2627 - RNA, 19 nt, Artificial Sequence
  Description of Artificial Sequence: Synthetic oligonucleotide
ccccugaggcuggauuuca

SEQ ID NO: 2628 - RNA, 19 nt, Artificial Sequence
  Description of Artificial Sequence: Synthetic oligonucleotide
accccugaggcuggauuuc

SEQ ID NO: 2629 - RNA, 19 nt, Artificial Sequence
  Description of Artificial Sequence: Synthetic oligonucleotide
gaccccugaggcuggauuu

SEQ ID NO: 2630 - RNA, 19 nt, Artificial Sequence
  Description of Artificial Sequence: Synthetic oligonucleotide
agaccccugaggcuggauu

SEQ ID NO: 2631 - RNA, 19 nt, Artificial Sequence
  Description of Artificial Sequence: Synthetic oligonucleotide
gagaccccugaggcuggau

SEQ ID NO: 2632 - RNA, 19 nt, Artificial Sequence
  Description of Artificial Sequence: Synthetic oligonucleotide
ggagaccccugaggcugga

SEQ ID NO: 2633 - RNA, 19 nt, Artificial Sequence
  Description of Artificial Sequence: Synthetic oligonucleotide
cggagaccccugaggcugg

SEQ ID NO: 2634 - RNA, 19 nt, Artificial Sequence
  Description of Artificial Sequence: Synthetic oligonucleotide
gcggagaccccugaggcug

SEQ ID NO: 2635 - RNA, 19 nt, Artificial Sequence
  Description of Artificial Sequence: Synthetic oligonucleotide
ggcggagaccccugaggcu

SEQ ID NO: 2636 - RNA, 19 nt, Artificial Sequence
  Description of Artificial Sequence: Synthetic oligonucleotide
uggcggagaccccugaggc

SEQ ID NO: 2637 - RNA, 19 nt, Artificial Sequence
  Description of Artificial Sequence: Synthetic oligonucleotide
auggcggagaccccugagg

SEQ ID NO: 2638 - RNA, 19 nt, Artificial Sequence
  Description of Artificial Sequence: Synthetic oligonucleotide
aauggcggagaccccugag

SEQ ID NO: 2639 - RNA, 19 nt, Artificial Sequence
  Description of Artificial Sequence: Synthetic oligonucleotide
aaauggcggagaccccuga

SEQ ID NO: 2640 - RNA, 19 nt, Artificial Sequence
  Description of Artificial Sequence: Synthetic oligonucleotide
aaaauggcggagaccccug

SEQ ID NO: 2641 - RNA, 19 nt, Artificial Sequence
  Description of Artificial Sequence: Synthetic oligonucleotide
aaaaauggcggagaccccu

SEQ ID NO: 2642 - RNA, 19 nt, Artificial Sequence
  Description of Artificial Sequence: Synthetic oligonucleotide
caaaaauggcggagacccc

SEQ ID NO: 2643 - RNA, 19 nt, Artificial Sequence
  Description of Artificial Sequence: Synthetic oligonucleotide
ccaaaaauggcggagaccc

SEQ ID NO: 2644 - RNA, 19 nt, Artificial Sequence
  Description of Artificial Sequence: Synthetic oligonucleotide
accaaaaauggcggagacc

SEQ ID NO: 2645 - RNA, 19 nt, Artificial Sequence
  Description of Artificial Sequence: Synthetic oligonucleotide
caccaaaaauggcggagac

SEQ ID NO: 2646 - RNA, 19 nt, Artificial Sequence
  Description of Artificial Sequence: Synthetic oligonucleotide
ucaccaaaaauggcggaga

SEQ ID NO: 2647 - RNA, 19 nt, Artificial Sequence
  Description of Artificial Sequence: Synthetic oligonucleotide
uucaccaaaaauggcggag

SEQ ID NO: 2648 - RNA, 19 nt, Artificial Sequence
  Description of Artificial Sequence: Synthetic oligonucleotide
guucaccaaaaauggcgga

SEQ ID NO: 2649 - RNA, 19 nt, Artificial Sequence
  Description of Artificial Sequence: Synthetic oligonucleotide
aguucaccaaaaauggcgg

SEQ ID NO: 2650 - RNA, 19 nt, Artificial Sequence
  Description of Artificial Sequence: Synthetic oligonucleotide
caguucaccaaaaauggcg

SEQ ID NO: 2651 - RNA, 19 nt, Artificial Sequence
  Description of Artificial Sequence: Synthetic oligonucleotide
gcaguucaccaaaaauggc

SEQ ID NO: 2652 - RNA, 19 nt, Artificial Sequence
  Description of Artificial Sequence: Synthetic oligonucleotide
ugcaguucaccaaaaaugg

SEQ ID NO: 2653 - RNA, 19 nt, Artificial Sequence
  Description of Artificial Sequence: Synthetic oligonucleotide
uugcaguucaccaaaaaug

SEQ ID NO: 2654 - RNA, 19 nt, Artificial Sequence
  Description of Artificial Sequence: Synthetic oligonucleotide
cuugcaguucaccaaaaau

SEQ ID NO: 2655 - RNA, 19 nt, Artificial Sequence
  Description of Artificial Sequence: Synthetic oligonucleotide
ucuugcaguucaccaaaaa

SEQ ID NO: 2656 - RNA, 19 nt, Artificial Sequence
  Description of Artificial Sequence: Synthetic oligonucleotide
aucuugcaguucaccaaaa

SEQ ID NO: 2657 - RNA, 19 nt, Artificial Sequence
  Description of Artificial Sequence: Synthetic oligonucleotide
caucuugcaguucaccaaa

SEQ ID NO: 2658 - RNA, 19 nt, Artificial Sequence
  Description of Artificial Sequence: Synthetic oligonucleotide
ucaucuugcaguucaccaa

SEQ ID NO: 2659 - RNA, 19 nt, Artificial Sequence
  Description of Artificial Sequence: Synthetic oligonucleotide
gucaucuugcaguucacca

SEQ ID NO: 2660 - RNA, 19 nt, Artificial Sequence
  Description of Artificial Sequence: Synthetic oligonucleotide
ggucaucuugcaguucacc

SEQ ID NO: 2661 - RNA, 19 nt, Artificial Sequence
  Description of Artificial Sequence: Synthetic oligonucleotide
aggucaucuugcaguucac

SEQ ID NO: 2662 - RNA, 19 nt, Artificial Sequence
  Description of Artificial Sequence: Synthetic oligonucleotide
gaggucaucuugcaguuca

SEQ ID NO: 2663 - RNA, 19 nt, Artificial Sequence
  Description of Artificial Sequence: Synthetic oligonucleotide
ugaggucaucuugcaguuc

SEQ ID NO: 2664 - RNA, 19 nt, Artificial Sequence
  Description of Artificial Sequence: Synthetic oligonucleotide
cugaggucaucuugcaguu

SEQ ID NO: 2665 - RNA, 19 nt, Artificial Sequence
  Description of Artificial Sequence: Synthetic oligonucleotide
ucugaggucaucuugcagu

SEQ ID NO: 2666 - RNA, 19 nt, Artificial Sequence
  Description of Artificial Sequence: Synthetic oligonucleotide
aucugaggucaucuugcag

SEQ ID NO: 2667 - RNA, 19 nt, Artificial Sequence
  Description of Artificial Sequence: Synthetic oligonucleotide
caucugaggucaucuugca

SEQ ID NO: 2668 - RNA, 19 nt, Artificial Sequence
  Description of Artificial Sequence: Synthetic oligonucleotide
ccaucugaggucaucuugc

SEQ ID NO: 2669 - RNA, 19 nt, Artificial Sequence
  Description of Artificial Sequence: Synthetic oligonucleotide
uccaucugaggucaucuug

SEQ ID NO: 2670 - RNA, 19 nt, Artificial Sequence
  Description of Artificial Sequence: Synthetic oligonucleotide
cuccaucugaggucaucuu

SEQ ID NO: 2671 - RNA, 19 nt, Artificial Sequence
  Description of Artificial Sequence: Synthetic oligonucleotide
ccuccaucugaggucaucu

SEQ ID NO: 2672 - RNA, 19 nt, Artificial Sequence
  Description of Artificial Sequence: Synthetic oligonucleotide
gccuccaucugaggucauc

SEQ ID NO: 2673 - RNA, 19 nt, Artificial Sequence
  Description of Artificial Sequence: Synthetic oligonucleotide
agccuccaucugaggucau

SEQ ID NO: 2674 - RNA, 19 nt, Artificial Sequence
  Description of Artificial Sequence: Synthetic oligonucleotide
cagccuccaucugagguca

SEQ ID NO: 2675 - RNA, 19 nt, Artificial Sequence
  Description of Artificial Sequence: Synthetic oligonucleotide
ccagccuccaucugagguc

SEQ ID NO: 2676 - RNA, 19 nt, Artificial Sequence
  Description of Artificial Sequence: Synthetic oligonucleotide
uccagccuccaucugaggu

SEQ ID NO: 2677 - RNA, 19 nt, Artificial Sequence
  Description of Artificial Sequence: Synthetic oligonucleotide
guccagccuccaucugagg

SEQ ID NO: 2678 - RNA, 19 nt, Artificial Sequence
  Description of Artificial Sequence: Synthetic oligonucleotide
uguccagccuccaucugag

SEQ ID NO: 2679 - RNA, 19 nt, Artificial Sequence
  Description of Artificial Sequence: Synthetic oligonucleotide
cuguccagccuccaucuga

SEQ ID NO: 2680 - RNA, 19 nt, Artificial Sequence
  Description of Artificial Sequence: Synthetic oligonucleotide
acuguccagccuccaucug

SEQ ID NO: 2681 - RNA, 19 nt, Artificial Sequence
  Description of Artificial Sequence: Synthetic oligonucleotide
uacuguccagccuccaucu

SEQ ID NO: 2682 - RNA, 19 nt, Artificial Sequence
  Description of Artificial Sequence: Synthetic oligonucleotide
uuacuguccagccuccauc

SEQ ID NO: 2683 - RNA, 19 nt, Artificial Sequence
  Description of Artificial Sequence: Synthetic oligonucleotide
auuacuguccagccuccau

SEQ ID NO: 2684 - RNA, 19 nt, Artificial Sequence
  Description of Artificial Sequence: Synthetic oligonucleotide
aauuacuguccagccucca

SEQ ID NO: 2685 - RNA, 19 nt, Artificial Sequence
  Description of Artificial Sequence: Synthetic oligonucleotide
gaauuacuguccagccucc

SEQ ID NO: 2686 - RNA, 19 nt, Artificial Sequence
  Description of Artificial Sequence: Synthetic oligonucleotide
ugaauuacuguccagccuc

SEQ ID NO: 2687 - RNA, 19 nt, Artificial Sequence
  Description of Artificial Sequence: Synthetic oligonucleotide
cugaauuacuguccagccu

SEQ ID NO: 2688 - RNA, 19 nt, Artificial Sequence
  Description of Artificial Sequence: Synthetic oligonucleotide
ucugaauuacuguccagcc

SEQ ID NO: 2689 - RNA, 19 nt, Artificial Sequence
  Description of Artificial Sequence: Synthetic oligonucleotide
cucugaauuacuguccagc

SEQ ID NO: 2690 - RNA, 19 nt, Artificial Sequence
  Description of Artificial Sequence: Synthetic oligonucleotide
ccucugaauuacuguccag

SEQ ID NO: 2691 - RNA, 19 nt, Artificial Sequence
  Description of Artificial Sequence: Synthetic oligonucleotide
gccucugaauuacugucca

SEQ ID NO: 2692 - RNA, 19 nt, Artificial Sequence
  Description of Artificial Sequence: Synthetic oligonucleotide
cgccucugaauuacugucc

SEQ ID NO: 2693 - RNA, 19 nt, Artificial Sequence
  Description of Artificial Sequence: Synthetic oligonucleotide
gcgccucugaauuacuguc

SEQ ID NO: 2694 - RNA, 19 nt, Artificial Sequence
  Description of Artificial Sequence: Synthetic oligonucleotide
ggcgccucugaauuacugu

SEQ ID NO: 2695 - RNA, 19 nt, Artificial Sequence
  Description of Artificial Sequence: Synthetic oligonucleotide
uggcgccucugaauuacug

SEQ ID NO: 2696 - RNA, 19 nt, Artificial Sequence
  Description of Artificial Sequence: Synthetic oligonucleotide
guggcgccucugaauuacu

SEQ ID NO: 2697 - RNA, 19 nt, Artificial Sequence
  Description of Artificial Sequence: Synthetic oligonucleotide
cguggcgccucugaauuac

SEQ ID NO: 2698 - RNA, 19 nt, Artificial Sequence
  Description of Artificial Sequence: Synthetic oligonucleotide
ucguggcgccucugaauua

SEQ ID NO: 2699 - RNA, 19 nt, Artificial Sequence
  Description of Artificial Sequence: Synthetic oligonucleotide
aucguggcgccucugaauu

SEQ ID NO: 2700 - RNA, 19 nt, Artificial Sequence
  Description of Artificial Sequence: Synthetic oligonucleotide
caucguggcgccucugaau

SEQ ID NO: 2701 - RNA, 19 nt, Artificial Sequence
  Description of Artificial Sequence: Synthetic oligonucleotide
ccaucguggcgccucugaa

SEQ ID NO: 2702 - RNA, 19 nt, Artificial Sequence
  Description of Artificial Sequence: Synthetic oligonucleotide
gccaucguggcgccucuga

SEQ ID NO: 2703 - RNA, 19 nt, Artificial Sequence
  Description of Artificial Sequence: Synthetic oligonucleotide
agccaucguggcgccucug

SEQ ID NO: 2704 - RNA, 19 nt, Artificial Sequence
  Description of Artificial Sequence: Synthetic oligonucleotide
gagccaucguggcgccucu

SEQ ID NO: 2705 - RNA, 19 nt, Artificial Sequence
  Description of Artificial Sequence: Synthetic oligonucleotide
ugagccaucguggcgccuc

SEQ ID NO: 2706 - RNA, 19 nt, Artificial Sequence
  Description of Artificial Sequence: Synthetic oligonucleotide
cugagccaucguggcgccu

SEQ ID NO: 2707 - RNA, 19 nt, Artificial Sequence
  Description of Artificial Sequence: Synthetic oligonucleotide
acugagccaucguggcgcc

SEQ ID NO: 2708 - RNA, 19 nt, Artificial Sequence
  Description of Artificial Sequence: Synthetic oligonucleotide
cacugagccaucguggcgc

SEQ ID NO: 2709 - RNA, 19 nt, Artificial Sequence
  Description of Artificial Sequence: Synthetic oligonucleotide
ccacugagccaucguggcg

SEQ ID NO: 2710 - RNA, 19 nt, Artificial Sequence
  Description of Artificial Sequence: Synthetic oligonucleotide
uccacugagccaucguggc

SEQ ID NO: 2711 - RNA, 19 nt, Artificial Sequence
  Description of Artificial Sequence: Synthetic oligonucleotide
guccacugagccaucgugg

SEQ ID NO: 2712 - RNA, 19 nt, Artificial Sequence
  Description of Artificial Sequence: Synthetic oligonucleotide
aguccacugagccaucgug

SEQ ID NO: 2713 - RNA, 19 nt, Artificial Sequence
  Description of Artificial Sequence: Synthetic oligonucleotide
aaguccacugagccaucgu

SEQ ID NO: 2714 - RNA, 19 nt, Artificial Sequence
  Description of Artificial Sequence: Synthetic oligonucleotide
gaaguccacugagccaucg

SEQ ID NO: 2715 - RNA, 19 nt, Artificial Sequence
  Description of Artificial Sequence: Synthetic oligonucleotide
ugaaguccacugagccauc

SEQ ID NO: 2716 - RNA, 19 nt, Artificial Sequence
  Description of Artificial Sequence: Synthetic oligonucleotide
uugaaguccacugagccau

SEQ ID NO: 2717 - RNA, 19 nt, Artificial Sequence
  Description of Artificial Sequence: Synthetic oligonucleotide
guugaaguccacugagcca

SEQ ID NO: 2718 - RNA, 19 nt, Artificial Sequence
  Description of Artificial Sequence: Synthetic oligonucleotide
gguugaaguccacugagcc

SEQ ID NO: 2719 - RNA, 19 nt, Artificial Sequence
  Description of Artificial Sequence: Synthetic oligonucleotide
cgguugaaguccacugagc

SEQ ID NO: 2720 - RNA, 19 nt, Artificial Sequence
  Description of Artificial Sequence: Synthetic oligonucleotide
ccgguugaaguccacugag

SEQ ID NO: 2721 - RNA, 19 nt, Artificial Sequence
  Description of Artificial Sequence: Synthetic oligonucleotide
gccgguugaaguccacuga

SEQ ID NO: 2722 - RNA, 19 nt, Artificial Sequence
  Description of Artificial Sequence: Synthetic oligonucleotide
ggccgguugaaguccacug

SEQ ID NO: 2723 - RNA, 19 nt, Artificial Sequence
  Description of Artificial Sequence: Synthetic oligonucleotide
gggccgguugaaguccacu

SEQ ID NO: 2724 - RNA, 19 nt, Artificial Sequence
  Description of Artificial Sequence: Synthetic oligonucleotide
agggccgguugaaguccac

SEQ ID NO: 2725 - RNA, 19 nt, Artificial Sequence
  Description of Artificial Sequence: Synthetic oligonucleotide
cagggccgguugaagucca

SEQ ID NO: 2726 - RNA, 19 nt, Artificial Sequence
  Description of Artificial Sequence: Synthetic oligonucleotide
ccagggccgguugaagucc

SEQ ID NO: 2727 - RNA, 19 nt, Artificial Sequence
  Description of Artificial Sequence: Synthetic oligonucleotide
cccagggccgguugaaguc

SEQ ID NO: 2728 - RNA, 19 nt, Artificial Sequence
  Description of Artificial Sequence: Synthetic oligonucleotide
ucccagggccgguugaagu

SEQ ID NO: 2729 - RNA, 19 nt, Artificial Sequence
  Description of Artificial Sequence: Synthetic oligonucleotide
uucccagggccgguugaag

SEQ ID NO: 2730 - RNA, 19 nt, Artificial Sequence
  Description of Artificial Sequence: Synthetic oligonucleotide
cuucccagggccgguugaa

SEQ ID NO: 2731 - RNA, 19 nt, Artificial Sequence
  Description of Artificial Sequence: Synthetic oligonucleotide
gcuucccagggccgguuga

SEQ ID NO: 2732 - RNA, 19 nt, Artificial Sequence
  Description of Artificial Sequence: Synthetic oligonucleotide
ggcuucccagggccgguug

SEQ ID NO: 2733 - RNA, 19 nt, Artificial Sequence
  Description of Artificial Sequence: Synthetic oligonucleotide
aggcuucccagggccgguu

SEQ ID NO: 2734 - RNA, 19 nt, Artificial Sequence
  Description of Artificial Sequence: Synthetic oligonucleotide
uaggcuucccagggccggu

SEQ ID NO: 2735 - RNA, 19 nt, Artificial Sequence
  Description of Artificial Sequence: Synthetic oligonucleotide
guaggcuucccagggccgg

SEQ ID NO: 2736 - RNA, 19 nt, Artificial Sequence
  Description of Artificial Sequence: Synthetic oligonucleotide
uguaggcuucccagggccg

SEQ ID NO: 2737 - RNA, 19 nt, Artificial Sequence
  Description of Artificial Sequence: Synthetic oligonucleotide
uuguaggcuucccagggcc

SEQ ID NO: 2738 - RNA, 19 nt, Artificial Sequence
  Description of Artificial Sequence: Synthetic oligonucleotide
cuuguaggcuucccagggc

SEQ ID NO: 2739 - RNA, 19 nt, Artificial Sequence
  Description of Artificial Sequence: Synthetic oligonucleotide
ccuuguaggcuucccaggg

SEQ ID NO: 2740 - RNA, 19 nt, Artificial Sequence
  Description of Artificial Sequence: Synthetic oligonucleotide
gccuuguaggcuucccagg

SEQ ID NO: 2741 - RNA, 19 nt, Artificial Sequence
  Description of Artificial Sequence: Synthetic oligonucleotide
cgccuuguaggcuucccag

SEQ ID NO: 2742 - RNA, 19 nt, Artificial Sequence
  Description of Artificial Sequence: Synthetic oligonucleotide
ccgccuuguaggcuuccca

SEQ ID NO: 2743 - RNA, 19 nt, Artificial Sequence
  Description of Artificial Sequence: Synthetic oligonucleotide
cccgccuuguaggcuuccc

SEQ ID NO: 2744 - RNA, 19 nt, Artificial Sequence
  Description of Artificial Sequence: Synthetic oligonucleotide
ccccgccuuguaggcuucc

SEQ ID NO: 2745 - RNA, 19 nt, Artificial Sequence
  Description of Artificial Sequence: Synthetic oligonucleotide
accccgccuuguaggcuuc

SEQ ID NO: 2746 - RNA, 19 nt, Artificial Sequence
  Description of Artificial Sequence: Synthetic oligonucleotide
aaccccgccuuguaggcuu

SEQ ID NO: 2747 - RNA, 19 nt, Artificial Sequence
  Description of Artificial Sequence: Synthetic oligonucleotide
aaaccccgccuuguaggcu

SEQ ID NO: 2748 - RNA, 19 nt, Artificial Sequence
  Description of Artificial Sequence: Synthetic oligonucleotide
caaaccccgccuuguaggc

SEQ ID NO: 2749 - RNA, 19 nt, Artificial Sequence
  Description of Artificial Sequence: Synthetic oligonucleotide
ccaaaccccgccuuguagg

SEQ ID NO: 2750 - RNA, 19 nt, Artificial Sequence
  Description of Artificial Sequence: Synthetic oligonucleotide
cccaaaccccgccuuguag

SEQ ID NO: 2751 - RNA, 19 nt, Artificial Sequence
  Description of Artificial Sequence: Synthetic oligonucleotide
ccccaaaccccgccuugua

SEQ ID NO: 2752 - RNA, 19 nt, Artificial Sequence
  Description of Artificial Sequence: Synthetic oligonucleotide
uccccaaaccccgccuugu

SEQ ID NO: 2753 - RNA, 19 nt, Artificial Sequence
  Description of Artificial Sequence: Synthetic oligonucleotide
auccccaaaccccgccuug

SEQ ID NO: 2754 - RNA, 19 nt, Artificial Sequence
  Description of Artificial Sequence: Synthetic oligonucleotide
gauccccaaaccccgccuu

SEQ ID NO: 2755 - RNA, 19 nt, Artificial Sequence
  Description of Artificial Sequence: Synthetic oligonucleotide
ggauccccaaaccccgccu

SEQ ID NO: 2756 - RNA, 19 nt, Artificial Sequence
  Description of Artificial Sequence: Synthetic oligonucleotide
gggauccccaaaccccgcc

SEQ ID NO: 2757 - RNA, 19 nt, Artificial Sequence
  Description of Artificial Sequence: Synthetic oligonucleotide
ggggauccccaaaccccgc

SEQ ID NO: 2758 - RNA, 19 nt, Artificial Sequence
  Description of Artificial Sequence: Synthetic oligonucleotide
uggggauccccaaaccccg

SEQ ID NO: 2759 - RNA, 19 nt, Artificial Sequence
  Description of Artificial Sequence: Synthetic oligonucleotide
guggggauccccaaacccc

SEQ ID NO: 2760 - RNA, 19 nt, Artificial Sequence
  Description of Artificial Sequence: Synthetic oligonucleotide
cguggggauccccaaaccc

SEQ ID NO: 2761 - RNA, 19 nt, Artificial Sequence
  Description of Artificial Sequence: Synthetic oligonucleotide
ccguggggauccccaaacc

SEQ ID NO: 2762 - RNA, 19 nt, Artificial Sequence
  Description of Artificial Sequence: Synthetic oligonucleotide
gccguggggauccccaaac

SEQ ID NO: 2763 - RNA, 19 nt, Artificial Sequence
  Description of Artificial Sequence: Synthetic oligonucleotide
cgccguggggauccccaaa

SEQ ID NO: 2764 - RNA, 19 nt, Artificial Sequence
  Description of Artificial Sequence: Synthetic oligonucleotide
ucgccguggggauccccaa

SEQ ID NO: 2765 - RNA, 19 nt, Artificial Sequence
  Description of Artificial Sequence: Synthetic oligonucleotide
cucgccguggggaucccca

SEQ ID NO: 2766 - RNA, 19 nt, Artificial Sequence
  Description of Artificial Sequence: Synthetic oligonucleotide
acucgccguggggaucccc

SEQ ID NO: 2767 - RNA, 19 nt, Artificial Sequence
  Description of Artificial Sequence: Synthetic oligonucleotide
aacucgccguggggauccc

SEQ ID NO: 2768 - RNA, 19 nt, Artificial Sequence
  Description of Artificial Sequence: Synthetic oligonucleotide
gaacucgccguggggaucc

SEQ ID NO: 2769 - RNA, 19 nt, Artificial Sequence
  Description of Artificial Sequence: Synthetic oligonucleotide
agaacucgccguggggauc

SEQ ID NO: 2770 - RNA, 19 nt, Artificial Sequence
  Description of Artificial Sequence: Synthetic oligonucleotide
cagaacucgccguggggau

SEQ ID NO: 2771 - RNA, 19 nt, Artificial Sequence
  Description of Artificial Sequence: Synthetic oligonucleotide
ccagaacucgccgugggga

SEQ ID NO: 2772 - RNA, 19 nt, Artificial Sequence
  Description of Artificial Sequence: Synthetic oligonucleotide
gccagaacucgccgugggg

SEQ ID NO: 2773 - RNA, 19 nt, Artificial Sequence
  Description of Artificial Sequence: Synthetic oligonucleotide
agccagaacucgccguggg

SEQ ID NO: 2774 - RNA, 19 nt, Artificial Sequence
  Description of Artificial Sequence: Synthetic oligonucleotide
cagccagaacucgccgugg

SEQ ID NO: 2775 - RNA, 19 nt, Artificial Sequence
  Description of Artificial Sequence: Synthetic oligonucleotide
ccagccagaacucgccgug

SEQ ID NO: 2776 - RNA, 19 nt, Artificial Sequence
  Description of Artificial Sequence: Synthetic oligonucleotide
cccagccagaacucgccgu

SEQ ID NO: 2777 - RNA, 19 nt, Artificial Sequence
  Description of Artificial Sequence: Synthetic oligonucleotide
acccagccagaacucgccg

SEQ ID NO: 2778 - RNA, 19 nt, Artificial Sequence
  Description of Artificial Sequence: Synthetic oligonucleotide
gacccagccagaacucgcc

SEQ ID NO: 2779 - RNA, 19 nt, Artificial Sequence
  Description of Artificial Sequence: Synthetic oligonucleotide
agacccagccagaacucgc

SEQ ID NO: 2780 - RNA, 19 nt, Artificial Sequence
  Description of Artificial Sequence: Synthetic oligonucleotide
cagacccagccagaacucg

SEQ ID NO: 2781 - RNA, 19 nt, Artificial Sequence
  Description of Artificial Sequence: Synthetic oligonucleotide
ccagacccagccagaacuc

SEQ ID NO: 2782 - RNA, 19 nt, Artificial Sequence
  Description of Artificial Sequence: Synthetic oligonucleotide
uccagacccagccagaacu

SEQ ID NO: 2783 - RNA, 19 nt, Artificial Sequence
  Description of Artificial Sequence: Synthetic oligonucleotide
cuccagacccagccagaac

SEQ ID NO: 2784 - RNA, 19 nt, Artificial Sequence
  Description of Artificial Sequence: Synthetic oligonucleotide
ucuccagacccagccagaa

SEQ ID NO: 2785 - RNA, 19 nt, Artificial Sequence
  Description of Artificial Sequence: Synthetic oligonucleotide
uucuccagacccagccaga

SEQ ID NO: 2786 - RNA, 19 nt, Artificial Sequence
  Description of Artificial Sequence: Synthetic oligonucleotide
cuucuccagacccagccag

SEQ ID NO: 2787 - RNA, 19 nt, Artificial Sequence
  Description of Artificial Sequence: Synthetic oligonucleotide
ccuucuccagacccagcca

SEQ ID NO: 2788 - RNA, 19 nt, Artificial Sequence
  Description of Artificial Sequence: Synthetic oligonucleotide
accuucuccagacccagcc

SEQ ID NO: 2789 - RNA, 19 nt, Artificial Sequence
  Description of Artificial Sequence: Synthetic oligonucleotide
caccuucuccagacccagc

SEQ ID NO: 2790 - RNA, 19 nt, Artificial Sequence
  Description of Artificial Sequence: Synthetic oligonucleotide
gcaccuucuccagacccag

SEQ ID NO: 2791 - RNA, 19 nt, Artificial Sequence
  Description of Artificial Sequence: Synthetic oligonucleotide
ugcaccuucuccagaccca

SEQ ID NO: 2792 - RNA, 19 nt, Artificial Sequence
  Description of Artificial Sequence: Synthetic oligonucleotide
augcaccuucuccagaccc

SEQ ID NO: 2793 - RNA, 19 nt, Artificial Sequence
  Description of Artificial Sequence: Synthetic oligonucleotide
uaugcaccuucuccagacc

SEQ ID NO: 2794 - RNA, 19 nt, Artificial Sequence
  Description of Artificial Sequence: Synthetic oligonucleotide
cuaugcaccuucuccagac

SEQ ID NO: 2795 - RNA, 19 nt, Artificial Sequence
  Description of Artificial Sequence: Synthetic oligonucleotide
gcuaugcaccuucuccaga

SEQ ID NO: 2796 - RNA, 19 nt, Artificial Sequence
  Description of Artificial Sequence: Synthetic oligonucleotide
ugcuaugcaccuucuccag

SEQ ID NO: 2797 - RNA, 19 nt, Artificial Sequence
  Description of Artificial Sequence: Synthetic oligonucleotide
augcuaugcaccuucucca

SEQ ID NO: 2798 - RNA, 19 nt, Artificial Sequence
  Description of Artificial Sequence: Synthetic oligonucleotide
gaugcuaugcaccuucucc

SEQ ID NO: 2799 - RNA, 19 nt, Artificial Sequence
  Description of Artificial Sequence: Synthetic oligonucleotide
ugaugcuaugcaccuucuc

SEQ ID NO: 2800 - RNA, 19 nt, Artificial Sequence
  Description of Artificial Sequence: Synthetic oligonucleotide
gugaugcuaugcaccuucu

SEQ ID NO: 2801 - RNA, 19 nt, Artificial Sequence
  Description of Artificial Sequence: Synthetic oligonucleotide
cgugaugcuaugcaccuuc

SEQ ID NO: 2802 - RNA, 19 nt, Artificial Sequence
  Description of Artificial Sequence: Synthetic oligonucleotide
ccgugaugcuaugcaccuu

SEQ ID NO: 2803 - RNA, 19 nt, Artificial Sequence
  Description of Artificial Sequence: Synthetic oligonucleotide
cccgugaugcuaugcaccu

SEQ ID NO: 2804 - RNA, 19 nt, Artificial Sequence
  Description of Artificial Sequence: Synthetic oligonucleotide
ccccgugaugcuaugcacc

SEQ ID NO: 2805 - RNA, 19 nt, Artificial Sequence
  Description of Artificial Sequence: Synthetic oligonucleotide
cccccgugaugcuaugcac

SEQ ID NO: 2806 - RNA, 19 nt, Artificial Sequence
  Description of Artificial Sequence: Synthetic oligonucleotide
ucccccgugaugcuaugca

SEQ ID NO: 2807 - RNA, 19 nt, Artificial Sequence
  Description of Artificial Sequence: Synthetic oligonucleotide
gucccccgugaugcuaugc

SEQ ID NO: 2808 - RNA, 19 nt, Artificial Sequence
  Description of Artificial Sequence: Synthetic oligonucleotide
ggucccccgugaugcuaug

SEQ ID NO: 2809 - RNA, 19 nt, Artificial Sequence
  Description of Artificial Sequence: Synthetic oligonucleotide
cggucccccgugaugcuau

SEQ ID NO: 2810 - RNA, 19 nt, Artificial Sequence
  Description of Artificial Sequence: Synthetic oligonucleotide
gcggucccccgugaugcua

SEQ ID NO: 2811 - RNA, 19 nt, Artificial Sequence
  Description of Artificial Sequence: Synthetic oligonucleotide
ugcggucccccgugaugcu

SEQ ID NO: 2812 - RNA, 19 nt, Artificial Sequence
  Description of Artificial Sequence: Synthetic oligonucleotide
uugcggucccccgugaugc

SEQ ID NO: 2813 - RNA, 19 nt, Artificial Sequence
  Description of Artificial Sequence: Synthetic oligonucleotide
guugcggucccccgugaug

SEQ ID NO: 2814 - RNA, 19 nt, Artificial Sequence
  Description of Artificial Sequence: Synthetic oligonucleotide
uguugcggucccccgugau

SEQ ID NO: 2815 - RNA, 19 nt, Artificial Sequence
  Description of Artificial Sequence: Synthetic oligonucleotide
cuguugcggucccccguga

SEQ ID NO: 2816 - RNA, 19 nt, Artificial Sequence
  Description of Artificial Sequence: Synthetic oligonucleotide
gcuguugcggucccccgug

SEQ ID NO: 2817 - RNA, 19 nt, Artificial Sequence
  Description of Artificial Sequence: Synthetic oligonucleotide
ggcuguugcggucccccgu

SEQ ID NO: 2818 - RNA, 19 nt, Artificial Sequence
  Description of Artificial Sequence: Synthetic oligonucleotide
cggcuguugcggucccccg

SEQ ID NO: 2819 - RNA, 19 nt, Artificial Sequence
  Description of Artificial Sequence: Synthetic oligonucleotide
gcggcuguugcgguccccc

SEQ ID NO: 2820 - RNA, 19 nt, Artificial Sequence
  Description of Artificial Sequence: Synthetic oligonucleotide
ggcggcuguugcggucccc

SEQ ID NO: 2821 - RNA, 19 nt, Artificial Sequence
  Description of Artificial Sequence: Synthetic oligonucleotide
aggcggcuguugcgguccc

SEQ ID NO: 2822 - RNA, 19 nt, Artificial Sequence
  Description of Artificial Sequence: Synthetic oligonucleotide
caggcggcuguugcggucc

SEQ ID NO: 2823 - RNA, 19 nt, Artificial Sequence
  Description of Artificial Sequence: Synthetic oligonucleotide
ccaggcggcuguugcgguc

SEQ ID NO: 2824 - RNA, 19 nt, Artificial Sequence
  Description of Artificial Sequence: Synthetic oligonucleotide
gccaggcggcuguugcggu

SEQ ID NO: 2825 - RNA, 19 nt, Artificial Sequence
  Description of Artificial Sequence: Synthetic oligonucleotide
ggccaggcggcuguugcgg

SEQ ID NO: 2826 - RNA, 19 nt, Artificial Sequence
  Description of Artificial Sequence: Synthetic oligonucleotide
cggccaggcggcuguugcg

SEQ ID NO: 2827 - RNA, 19 nt, Artificial Sequence
  Description of Artificial Sequence: Synthetic oligonucleotide
acggccaggcggcuguugc

SEQ ID NO: 2828 - RNA, 19 nt, Artificial Sequence
  Description of Artificial Sequence: Synthetic oligonucleotide
cacggccaggcggcuguug

SEQ ID NO: 2829 - RNA, 19 nt, Artificial Sequence
  Description of Artificial Sequence: Synthetic oligonucleotide
gcacggccaggcggcuguu

SEQ ID NO: 2830 - RNA, 19 nt, Artificial Sequence
  Description of Artificial Sequence: Synthetic oligonucleotide
ugcacggccaggcggcugu

SEQ ID NO: 2831 - RNA, 19 nt, Artificial Sequence
  Description of Artificial Sequence: Synthetic oligonucleotide
cugcacggccaggcggcug

SEQ ID NO: 2832 - RNA, 19 nt, Artificial Sequence
  Description of Artificial Sequence: Synthetic oligonucleotide
gcugcacggccaggcggcu

SEQ ID NO: 2833 - RNA, 19 nt, Artificial Sequence
  Description of Artificial Sequence: Synthetic oligonucleotide
agcugcacggccaggcggc

SEQ ID NO: 2834 - RNA, 19 nt, Artificial Sequence
  Description of Artificial Sequence: Synthetic oligonucleotide
cagcugcacggccaggcgg

SEQ ID NO: 2835 - RNA, 19 nt, Artificial Sequence
  Description of Artificial Sequence: Synthetic oligonucleotide
gcagcugcacggccaggcg

SEQ ID NO: 2836 - RNA, 19 nt, Artificial Sequence
  Description of Artificial Sequence: Synthetic oligonucleotide
cgcagcugcacggccaggc

SEQ ID NO: 2837 - RNA, 19 nt, Artificial Sequence
  Description of Artificial Sequence: Synthetic oligonucleotide
ccgcagcugcacggccagg

SEQ ID NO: 2838 - RNA, 19 nt, Artificial Sequence
  Description of Artificial Sequence: Synthetic oligonucleotide
cccgcagcugcacggccag

SEQ ID NO: 2839 - RNA, 19 nt, Artificial Sequence
  Description of Artificial Sequence: Synthetic oligonucleotide
ucccgcagcugcacggcca

SEQ ID NO: 2840 - RNA, 19 nt, Artificial Sequence
  Description of Artificial Sequence: Synthetic oligonucleotide
gucccgcagcugcacggcc

SEQ ID NO: 2841 - RNA, 19 nt, Artificial Sequence
  Description of Artificial Sequence: Synthetic oligonucleotide
agucccgcagcugcacggc

SEQ ID NO: 2842 - RNA, 19 nt, Artificial Sequence
  Description of Artificial Sequence: Synthetic oligonucleotide
cagucccgcagcugcacgg

SEQ ID NO: 2843 - RNA, 19 nt, Artificial Sequence
  Description of Artificial Sequence: Synthetic oligonucleotide
ccagucccgcagcugcacg

SEQ ID NO: 2844 - RNA, 19 nt, Artificial Sequence
  Description of Artificial Sequence: Synthetic oligonucleotide
cccagucccgcagcugcac

SEQ ID NO: 2845 - RNA, 19 nt, Artificial Sequence
  Description of Artificial Sequence: Synthetic oligonucleotide
ucccagucccgcagcugca

SEQ ID NO: 2846 - RNA, 19 nt, Artificial Sequence
  Description of Artificial Sequence: Synthetic oligonucleotide
aucccagucccgcagcugc

SEQ ID NO: 2847 - RNA, 19 nt, Artificial Sequence
  Description of Artificial Sequence: Synthetic oligonucleotide
caucccagucccgcagcug

SEQ ID NO: 2848 - RNA, 19 nt, Artificial Sequence
  Description of Artificial Sequence: Synthetic oligonucleotide
ccaucccagucccgcagcu

SEQ ID NO: 2849 - RNA, 19 nt, Artificial Sequence
  Description of Artificial Sequence: Synthetic oligonucleotide
gccaucccagucccgcagc

SEQ ID NO: 2850 - RNA, 19 nt, Artificial Sequence
  Description of Artificial Sequence: Synthetic oligonucleotide
ugccaucccagucccgcag

SEQ ID NO: 2851 - RNA, 19 nt, Artificial Sequence
  Description of Artificial Sequence: Synthetic oligonucleotide
uugccaucccagucccgca

SEQ ID NO: 2852 - RNA, 19 nt, Artificial Sequence
  Description of Artificial Sequence: Synthetic oligonucleotide
guugccaucccagucccgc

SEQ ID NO: 2853 - RNA, 19 nt, Artificial Sequence
  Description of Artificial Sequence: Synthetic oligonucleotide
cguugccaucccagucccg

SEQ ID NO: 2854 - RNA, 19 nt, Artificial Sequence
  Description of Artificial Sequence: Synthetic oligonucleotide
gcguugccaucccaguccc

SEQ ID NO: 2855 - RNA, 19 nt, Artificial Sequence
  Description of Artificial Sequence: Synthetic oligonucleotide
ggcguugccaucccagucc

SEQ ID NO: 2856 - RNA, 19 nt, Artificial Sequence
  Description of Artificial Sequence: Synthetic oligonucleotide
cggcguugccaucccaguc

SEQ ID NO: 2857 - RNA, 19 nt, Artificial Sequence
  Description of Artificial Sequence: Synthetic oligonucleotide
ucggcguugccaucccagu

SEQ ID NO: 2858 - RNA, 19 nt, Artificial Sequence
  Description of Artificial Sequence: Synthetic oligonucleotide
cucggcguugccaucccag

SEQ ID NO: 2859 - RNA, 19 nt, Artificial Sequence
  Description of Artificial Sequence: Synthetic oligonucleotide
acucggcguugccauccca

SEQ ID NO: 2860 - RNA, 19 nt, Artificial Sequence
  Description of Artificial Sequence: Synthetic oligonucleotide
aacucggcguugccauccc

SEQ ID NO: 2861 - RNA, 19 nt, Artificial Sequence
  Description of Artificial Sequence: Synthetic oligonucleotide
caacucggcguugccaucc

SEQ ID NO: 2862 - RNA, 19 nt, Artificial Sequence
  Description of Artificial Sequence: Synthetic oligonucleotide
gcaacucggcguugccauc

SEQ ID NO: 2863 - RNA, 19 nt, Artificial Sequence
  Description of Artificial Sequence: Synthetic oligonucleotide
agcaacucggcguugccau

SEQ ID NO: 2864 - RNA, 19 nt, Artificial Sequence
  Description of Artificial Sequence: Synthetic oligonucleotide
cagcaacucggcguugcca

SEQ ID NO: 2865 - RNA, 19 nt, Artificial Sequence
  Description of Artificial Sequence: Synthetic oligonucleotide
gcagcaacucggcguugcc

SEQ ID NO: 2866 - RNA, 19 nt, Artificial Sequence
  Description of Artificial Sequence: Synthetic oligonucleotide
ugcagcaacucggcguugc

SEQ ID NO: 2867 - RNA, 19 nt, Artificial Sequence
  Description of Artificial Sequence: Synthetic oligonucleotide
cugcagcaacucggcguug

SEQ ID NO: 2868 - RNA, 19 nt, Artificial Sequence
  Description of Artificial Sequence: Synthetic oligonucleotide
acugcagcaacucggcguu

SEQ ID NO: 2869 - RNA, 19 nt, Artificial Sequence
  Description of Artificial Sequence: Synthetic oligonucleotide
aacugcagcaacucggcgu

SEQ ID NO: 2870 - RNA, 19 nt, Artificial Sequence
  Description of Artificial Sequence: Synthetic oligonucleotide
gaacugcagcaacucggcg

SEQ ID NO: 2871 - RNA, 19 nt, Artificial Sequence
  Description of Artificial Sequence: Synthetic oligonucleotide
agaacugcagcaacucggc

SEQ ID NO: 2872 - RNA, 19 nt, Artificial Sequence
  Description of Artificial Sequence: Synthetic oligonucleotide
gagaacugcagcaacucgg

SEQ ID NO: 2873 - RNA, 19 nt, Artificial Sequence
  Description of Artificial Sequence: Synthetic oligonucleotide
ggagaacugcagcaacucg

SEQ ID NO: 2874 - RNA, 19 nt, Artificial Sequence
  Description of Artificial Sequence: Synthetic oligonucleotide
cggagaacugcagcaacuc

SEQ ID NO: 2875 - RNA, 19 nt, Artificial Sequence
  Description of Artificial Sequence: Synthetic oligonucleotide
acggagaacugcagcaacu

SEQ ID NO: 2876 - RNA, 19 nt, Artificial Sequence
  Description of Artificial Sequence: Synthetic oligonucleotide
cacggagaacugcagcaac

SEQ ID NO: 2877 - RNA, 19 nt, Artificial Sequence
  Description of Artificial Sequence: Synthetic oligonucleotide
gcacggagaacugcagcaa

SEQ ID NO: 2878 - RNA, 19 nt, Artificial Sequence
  Description of Artificial Sequence: Synthetic oligonucleotide
ugcacggagaacugcagca

SEQ ID NO: 2879 - RNA, 19 nt, Artificial Sequence
  Description of Artificial Sequence: Synthetic oligonucleotide
gugcacggagaacugcagc

SEQ ID NO: 2880 - RNA, 19 nt, Artificial Sequence
  Description of Artificial Sequence: Synthetic oligonucleotide
ggugcacggagaacugcag

SEQ ID NO: 2881 - RNA, 19 nt, Artificial Sequence
  Description of Artificial Sequence: Synthetic oligonucleotide
aggugcacggagaacugca

SEQ ID NO: 2882 - RNA, 19 nt, Artificial Sequence
  Description of Artificial Sequence: Synthetic oligonucleotide
caggugcacggagaacugc

SEQ ID NO: 2883 - RNA, 19 nt, Artificial Sequence
  Description of Artificial Sequence: Synthetic oligonucleotide
ccaggugcacggagaacug

SEQ ID NO: 2884 - RNA, 19 nt, Artificial Sequence
  Description of Artificial Sequence: Synthetic oligonucleotide
cccaggugcacggagaacu

SEQ ID NO: 2885 - RNA, 19 nt, Artificial Sequence
  Description of Artificial Sequence: Synthetic oligonucleotide
acccaggugcacggagaac

SEQ ID NO: 2886 - RNA, 19 nt, Artificial Sequence
  Description of Artificial Sequence: Synthetic oligonucleotide
cacccaggugcacggagaa

SEQ ID NO: 2887 - RNA, 19 nt, Artificial Sequence
  Description of Artificial Sequence: Synthetic oligonucleotide
ccacccaggugcacggaga

SEQ ID NO: 2888 - RNA, 19 nt, Artificial Sequence
  Description of Artificial Sequence: Synthetic oligonucleotide
gccacccaggugcacggag

SEQ ID NO: 2889 - RNA, 19 nt, Artificial Sequence
  Description of Artificial Sequence: Synthetic oligonucleotide
cgccacccaggugcacgga

SEQ ID NO: 2890 - RNA, 19 nt, Artificial Sequence
  Description of Artificial Sequence: Synthetic oligonucleotide
ucgccacccaggugcacgg

SEQ ID NO: 2891 - RNA, 19 nt, Artificial Sequence
  Description of Artificial Sequence: Synthetic oligonucleotide
cucgccacccaggugcacg

SEQ ID NO: 2892 - RNA, 19 nt, Artificial Sequence
  Description of Artificial Sequence: Synthetic oligonucleotide
ccucgccacccaggugcac

SEQ ID NO: 2893 - RNA, 19 nt, Artificial Sequence
  Description of Artificial Sequence: Synthetic oligonucleotide
uccucgccacccaggugca

SEQ ID NO: 2894 - RNA, 19 nt, Artificial Sequence
  Description of Artificial Sequence: Synthetic oligonucleotide
guccucgccacccaggugc

SEQ ID NO: 2895 - RNA, 19 nt, Artificial Sequence
  Description of Artificial Sequence: Synthetic oligonucleotide
uguccucgccacccaggug

SEQ ID NO: 2896 - RNA, 19 nt, Artificial Sequence
  Description of Artificial Sequence: Synthetic oligonucleotide
guguccucgccacccaggu

SEQ ID NO: 2897 - RNA, 19 nt, Artificial Sequence
  Description of Artificial Sequence: Synthetic oligonucleotide
cguguccucgccacccagg

SEQ ID NO: 2898 - RNA, 19 nt, Artificial Sequence
  Description of Artificial Sequence: Synthetic oligonucleotide
ccguguccucgccacccag

SEQ ID NO: 2899 - RNA, 19 nt, Artificial Sequence
  Description of Artificial Sequence: Synthetic oligonucleotide
gccguguccucgccaccca

SEQ ID NO: 2900 - RNA, 19 nt, Artificial Sequence
  Description of Artificial Sequence: Synthetic oligonucleotide
ggccguguccucgccaccc

SEQ ID NO: 2901 - RNA, 19 nt, Artificial Sequence
  Description of Artificial Sequence: Synthetic oligonucleotide
aggccguguccucgccacc

SEQ ID NO: 2902 - RNA, 19 nt, Artificial Sequence
  Description of Artificial Sequence: Synthetic oligonucleotide
uaggccguguccucgccac

SEQ ID NO: 2903 - RNA, 19 nt, Artificial Sequence
  Description of Artificial Sequence: Synthetic oligonucleotide
auaggccguguccucgcca

SEQ ID NO: 2904 - RNA, 19 nt, Artificial Sequence
  Description of Artificial Sequence: Synthetic oligonucleotide
uauaggccguguccucgcc

SEQ ID NO: 2905 - RNA, 19 nt, Artificial Sequence
  Description of Artificial Sequence: Synthetic oligonucleotide
cuauaggccguguccucgc

SEQ ID NO: 2906 - RNA, 19 nt, Artificial Sequence
  Description of Artificial Sequence: Synthetic oligonucleotide
gcuauaggccguguccucg

SEQ ID NO: 2907 - RNA, 19 nt, Artificial Sequence
  Description of Artificial Sequence: Synthetic oligonucleotide
ggcuauaggccguguccuc

SEQ ID NO: 2908 - RNA, 19 nt, Artificial Sequence
  Description of Artificial Sequence: Synthetic oligonucleotide
aggcuauaggccguguccu

SEQ ID NO: 2909 - RNA, 19 nt, Artificial Sequence
  Description of Artificial Sequence: Synthetic oligonucleotide
caggcuauaggccgugucc

SEQ ID NO: 2910 - RNA, 19 nt, Artificial Sequence
  Description of Artificial Sequence: Synthetic oligonucleotide
gcaggcuauaggccguguc

SEQ ID NO: 2911 - RNA, 19 nt, Artificial Sequence
  Description of Artificial Sequence: Synthetic oligonucleotide
ugcaggcuauaggccgugu

SEQ ID NO: 2912 - RNA, 19 nt, Artificial Sequence
  Description of Artificial Sequence: Synthetic oligonucleotide
cugcaggcuauaggccgug

SEQ ID NO: 2913 - RNA, 19 nt, Artificial Sequence
  Description of Artificial Sequence: Synthetic oligonucleotide
gcugcaggcuauaggccgu

SEQ ID NO: 2914 - RNA, 19 nt, Artificial Sequence
  Description of Artificial Sequence: Synthetic oligonucleotide
agcugcaggcuauaggccg

SEQ ID NO: 2915 - RNA, 19 nt, Artificial Sequence
  Description of Artificial Sequence: Synthetic oligonucleotide
gagcugcaggcuauaggcc

SEQ ID NO: 2916 - RNA, 19 nt, Artificial Sequence
  Description of Artificial Sequence: Synthetic oligonucleotide
ugagcugcaggcuauaggc

SEQ ID NO: 2917 - RNA, 19 nt, Artificial Sequence
  Description of Artificial Sequence: Synthetic oligonucleotide
gugagcugcaggcuauagg

SEQ ID NO: 2918 - RNA, 19 nt, Artificial Sequence
  Description of Artificial Sequence: Synthetic oligonucleotide
agugagcugcaggcuauag

SEQ ID NO: 2919 - RNA, 19 nt, Artificial Sequence
  Description of Artificial Sequence: Synthetic oligonucleotide
cagugagcugcaggcuaua

SEQ ID NO: 2920 - RNA, 19 nt, Artificial Sequence
  Description of Artificial Sequence: Synthetic oligonucleotide
gcagugagcugcaggcuau

SEQ ID NO: 2921 - RNA, 19 nt, Artificial Sequence
  Description of Artificial Sequence: Synthetic oligonucleotide
ugcagugagcugcaggcua

SEQ ID NO: 2922 - RNA, 19 nt, Artificial Sequence
  Description of Artificial Sequence: Synthetic oligonucleotide
gugcagugagcugcaggcu

SEQ ID NO: 2923 - RNA, 19 nt, Artificial Sequence
  Description of Artificial Sequence: Synthetic oligonucleotide
ggugcagugagcugcaggc

SEQ ID NO: 2924 - RNA, 19 nt, Artificial Sequence
  Description of Artificial Sequence: Synthetic oligonucleotide
gggugcagugagcugcagg

SEQ ID NO: 2925 - RNA, 19 nt, Artificial Sequence
  Description of Artificial Sequence: Synthetic oligonucleotide
cgggugcagugagcugcag

SEQ ID NO: 2926 - RNA, 19 nt, Artificial Sequence
  Description of Artificial Sequence: Synthetic oligonucleotide
acgggugcagugagcugca

SEQ ID NO: 2927 - RNA, 19 nt, Artificial Sequence
  Description of Artificial Sequence: Synthetic oligonucleotide
cacgggugcagugagcugc

SEQ ID NO: 2928 - RNA, 19 nt, Artificial Sequence
  Description of Artificial Sequence: Synthetic oligonucleotide
ccacgggugcagugagcug

SEQ ID NO: 2929 - RNA, 19 nt, Artificial Sequence
  Description of Artificial Sequence: Synthetic oligonucleotide
gccacgggugcagugagcu

SEQ ID NO: 2930 - RNA, 19 nt, Artificial Sequence
  Description of Artificial Sequence: Synthetic oligonucleotide
ggccacgggugcagugagc

SEQ ID NO: 2931 - RNA, 19 nt, Artificial Sequence
  Description of Artificial Sequence: Synthetic oligonucleotide
cggccacgggugcagugag

SEQ ID NO: 2932 - RNA, 19 nt, Artificial Sequence
  Description of Artificial Sequence: Synthetic oligonucleotide
ccggccacgggugcaguga

SEQ ID NO: 2933 - RNA, 19 nt, Artificial Sequence
  Description of Artificial Sequence: Synthetic oligonucleotide
gccggccacgggugcagug

SEQ ID NO: 2934 - RNA, 19 nt, Artificial Sequence
  Description of Artificial Sequence: Synthetic oligonucleotide
ggccggccacgggugcagu

SEQ ID NO: 2935 - RNA, 19 nt, Artificial Sequence
  Description of Artificial Sequence: Synthetic oligonucleotide
uggccggccacgggugcag

SEQ ID NO: 2936 - RNA, 19 nt, Artificial Sequence
  Description of Artificial Sequence: Synthetic oligonucleotide
cuggccggccacgggugca

SEQ ID NO: 2937 - RNA, 19 nt, Artificial Sequence
  Description of Artificial Sequence: Synthetic oligonucleotide
gcuggccggccacgggugc

SEQ ID NO: 2938 - RNA, 19 nt, Artificial Sequence
  Description of Artificial Sequence: Synthetic oligonucleotide
agcuggccggccacgggug

SEQ ID NO: 2939 - RNA, 19 nt, Artificial Sequence
  Description of Artificial Sequence: Synthetic oligonucleotide
cagcuggccggccacgggu

SEQ ID NO: 2940 - RNA, 19 nt, Artificial Sequence
  Description of Artificial Sequence: Synthetic oligonucleotide
ccagcuggccggccacggg

SEQ ID NO: 2941 - RNA, 19 nt, Artificial Sequence
  Description of Artificial Sequence: Synthetic oligonucleotide
cccagcuggccggccacgg

SEQ ID NO: 2942 - RNA, 19 nt, Artificial Sequence
  Description of Artificial Sequence: Synthetic oligonucleotide
gcccagcuggccggccacg

SEQ ID NO: 2943 - RNA, 19 nt, Artificial Sequence
  Description of Artificial Sequence: Synthetic oligonucleotide
cgcccagcuggccggccac

SEQ ID NO: 2944 - RNA, 19 nt, Artificial Sequence
  Description of Artificial Sequence: Synthetic oligonucleotide
gcgcccagcuggccggcca

SEQ ID NO: 2945 - RNA, 19 nt, Artificial Sequence
  Description of Artificial Sequence: Synthetic oligonucleotide
ggcgcccagcuggccggcc

SEQ ID NO: 2946 - RNA, 19 nt, Artificial Sequence
  Description of Artificial Sequence: Synthetic oligonucleotide
uggcgcccagcuggccggc

SEQ ID NO: 2947 - RNA, 19 nt, Artificial Sequence
  Description of Artificial Sequence: Synthetic oligonucleotide
guggcgcccagcuggccgg

SEQ ID NO: 2948 - RNA, 19 nt, Artificial Sequence
  Description of Artificial Sequence: Synthetic oligonucleotide
gguggcgcccagcuggccg

SEQ ID NO: 2949 - RNA, 19 nt, Artificial Sequence
  Description of Artificial Sequence: Synthetic oligonucleotide
ugguggcgcccagcuggcc

SEQ ID NO: 2950 - RNA, 19 nt, Artificial Sequence
  Description of Artificial Sequence: Synthetic oligonucleotide
gugguggcgcccagcuggc

SEQ ID NO: 2951 - RNA, 19 nt, Artificial Sequence
  Description of Artificial Sequence: Synthetic oligonucleotide
ggugguggcgcccagcugg

SEQ ID NO: 2952 - RNA, 19 nt, Artificial Sequence
  Description of Artificial Sequence: Synthetic oligonucleotide
cggugguggcgcccagcug

SEQ ID NO: 2953 - RNA, 19 nt, Artificial Sequence
  Description of Artificial Sequence: Synthetic oligonucleotide
acggugguggcgcccagcu

SEQ ID NO: 2954 - RNA, 19 nt, Artificial Sequence
  Description of Artificial Sequence: Synthetic oligonucleotide
gacggugguggcgcccagc

SEQ ID NO: 2955 - RNA, 19 nt, Artificial Sequence
  Description of Artificial Sequence: Synthetic oligonucleotide
ggacggugguggcgcccag

SEQ ID NO: 2956 - RNA, 19 nt, Artificial Sequence
  Description of Artificial Sequence: Synthetic oligonucleotide
gggacggugguggcgccca

SEQ ID NO: 2957 - RNA, 19 nt, Artificial Sequence
  Description of Artificial Sequence: Synthetic oligonucleotide
ugggacggugguggcgccc

SEQ ID NO: 2958 - RNA, 19 nt, Artificial Sequence
  Description of Artificial Sequence: Synthetic oligonucleotide
gugggacggugguggcgcc

SEQ ID NO: 2959 - RNA, 19 nt, Artificial Sequence
  Description of Artificial Sequence: Synthetic oligonucleotide
ggugggacggugguggcgc

SEQ ID NO: 2960 - RNA, 19 nt, Artificial Sequence
  Description of Artificial Sequence: Synthetic oligonucleotide
gggugggacggugguggcg

SEQ ID NO: 2961 - RNA, 19 nt, Artificial Sequence
  Description of Artificial Sequence: Synthetic oligonucleotide
ugggugggacggugguggc

SEQ ID NO: 2962 - RNA, 19 nt, Artificial Sequence
  Description of Artificial Sequence: Synthetic oligonucleotide
cugggugggacgguggugg

SEQ ID NO: 2963 - RNA, 19 nt, Artificial Sequence
  Description of Artificial Sequence: Synthetic oligonucleotide
gcugggugggacgguggug

SEQ ID NO: 2964 - RNA, 19 nt, Artificial Sequence
  Description of Artificial Sequence: Synthetic oligonucleotide
cgcugggugggacgguggu

SEQ ID NO: 2965 - RNA, 19 nt, Artificial Sequence
  Description of Artificial Sequence: Synthetic oligonucleotide
ccgcugggugggacggugg

SEQ ID NO: 2966 - RNA, 19 nt, Artificial Sequence
  Description of Artificial Sequence: Synthetic oligonucleotide
gccgcugggugggacggug

SEQ ID NO: 2967 - RNA, 19 nt, Artificial Sequence
  Description of Artificial Sequence: Synthetic oligonucleotide
ggccgcugggugggacggu

SEQ ID NO: 2968 - RNA, 19 nt, Artificial Sequence
  Description of Artificial Sequence: Synthetic oligonucleotide
aggccgcugggugggacgg

SEQ ID NO: 2969 - RNA, 19 nt, Artificial Sequence
  Description of Artificial Sequence: Synthetic oligonucleotide
gaggccgcugggugggacg

SEQ ID NO: 2970 - RNA, 19 nt, Artificial Sequence
  Description of Artificial Sequence: Synthetic oligonucleotide
agaggccgcugggugggac

SEQ ID NO: 2971 - RNA, 19 nt, Artificial Sequence
  Description of Artificial Sequence: Synthetic oligonucleotide
gagaggccgcuggguggga

SEQ ID NO: 2972 - RNA, 19 nt, Artificial Sequence
  Description of Artificial Sequence: Synthetic oligonucleotide
ggagaggccgcuggguggg

SEQ ID NO: 2973 - RNA, 19 nt, Artificial Sequence
  Description of Artificial Sequence: Synthetic oligonucleotide
cggagaggccgcugggugg

SEQ ID NO: 2974 - RNA, 19 nt, Artificial Sequence
  Description of Artificial Sequence: Synthetic oligonucleotide
acggagaggccgcugggug

SEQ ID NO: 2975 - RNA, 19 nt, Artificial Sequence
  Description of Artificial Sequence: Synthetic oligonucleotide
uacggagaggccgcugggu

SEQ ID NO: 2976 - RNA, 19 nt, Artificial Sequence
  Description of Artificial Sequence: Synthetic oligonucleotide
guacggagaggccgcuggg

SEQ ID NO: 2977 - RNA, 19 nt, Artificial Sequence
  Description of Artificial Sequence: Synthetic oligonucleotide
gguacggagaggccgcugg

SEQ ID NO: 2978 - RNA, 19 nt, Artificial Sequence
  Description of Artificial Sequence: Synthetic oligonucleotide
ggguacggagaggccgcug

SEQ ID NO: 2979 - RNA, 19 nt, Artificial Sequence
  Description of Artificial Sequence: Synthetic oligonucleotide
aggguacggagaggccgcu

SEQ ID NO: 2980 - RNA, 19 nt, Artificial Sequence
  Description of Artificial Sequence: Synthetic oligonucleotide
aaggguacggagaggccgc

SEQ ID NO: 2981 - RNA, 19 nt, Artificial Sequence
  Description of Artificial Sequence: Synthetic oligonucleotide
gaaggguacggagaggccg

SEQ ID NO: 2982 - RNA, 19 nt, Artificial Sequence
  Description of Artificial Sequence: Synthetic oligonucleotide
agaaggguacggagaggcc

SEQ ID NO: 2983 - RNA, 19 nt, Artificial Sequence
  Description of Artificial Sequence: Synthetic oligonucleotide
gagaaggguacggagaggc

SEQ ID NO: 2984 - RNA, 19 nt, Artificial Sequence
  Description of Artificial Sequence: Synthetic oligonucleotide
ggagaaggguacggagagg

SEQ ID NO: 2985 - RNA, 19 nt, Artificial Sequence
  Description of Artificial Sequence: Synthetic oligonucleotide
uggagaaggguacggagag

SEQ ID NO: 2986 - RNA, 19 nt, Artificial Sequence
  Description of Artificial Sequence: Synthetic oligonucleotide
guggagaaggguacggaga

SEQ ID NO: 2987 - RNA, 19 nt, Artificial Sequence
  Description of Artificial Sequence: Synthetic oligonucleotide
aguggagaaggguacggag

SEQ ID NO: 2988 - RNA, 19 nt, Artificial Sequence
  Description of Artificial Sequence: Synthetic oligonucleotide
aaguggagaaggguacgga

SEQ ID NO: 2989 - RNA, 19 nt, Artificial Sequence
  Description of Artificial Sequence: Synthetic oligonucleotide
caaguggagaaggguacgg

SEQ ID NO: 2990 - RNA, 19 nt, Artificial Sequence
  Description of Artificial Sequence: Synthetic oligonucleotide
ccaaguggagaaggguacg

SEQ ID NO: 2991 - RNA, 19 nt, Artificial Sequence
  Description of Artificial Sequence: Synthetic oligonucleotide
cccaaguggagaaggguac

SEQ ID NO: 2992 - RNA, 19 nt, Artificial Sequence
  Description of Artificial Sequence: Synthetic oligonucleotide
ucccaaguggagaagggua

SEQ ID NO: 2993 - RNA, 19 nt, Artificial Sequence
  Description of Artificial Sequence: Synthetic oligonucleotide
gucccaaguggagaagggu

SEQ ID NO: 2994 - RNA, 19 nt, Artificial Sequence
  Description of Artificial Sequence: Synthetic oligonucleotide
ggucccaaguggagaaggg

SEQ ID NO: 2995 - RNA, 19 nt, Artificial Sequence
  Description of Artificial Sequence: Synthetic oligonucleotide
uggucccaaguggagaagg

SEQ ID NO: 2996 - RNA, 19 nt, Artificial Sequence
  Description of Artificial Sequence: Synthetic oligonucleotide
cuggucccaaguggagaag

SEQ ID NO: 2997 - RNA, 19 nt, Artificial Sequence
  Description of Artificial Sequence: Synthetic oligonucleotide
ccuggucccaaguggagaa

SEQ ID NO: 2998 - RNA, 19 nt, Artificial Sequence
  Description of Artificial Sequence: Synthetic oligonucleotide
uccuggucccaaguggaga

SEQ ID NO: 2999 - RNA, 19 nt, Artificial Sequence
  Description of Artificial Sequence: Synthetic oligonucleotide
auccuggucccaaguggag

SEQ ID NO: 3000 - RNA, 19 nt, Artificial Sequence
  Description of Artificial Sequence: Synthetic oligonucleotide
gauccuggucccaagugga

SEQ ID NO: 3001 - RNA, 19 nt, Artificial Sequence
  Description of Artificial Sequence: Synthetic oligonucleotide
ugauccuggucccaagugg

SEQ ID NO: 3002 - RNA, 19 nt, Artificial Sequence
  Description of Artificial Sequence: Synthetic oligonucleotide
gugauccuggucccaagug

SEQ ID NO: 3003 - RNA, 19 nt, Artificial Sequence
  Description of Artificial Sequence: Synthetic oligonucleotide
cgugauccuggucccaagu

SEQ ID NO: 3004 - RNA, 19 nt, Artificial Sequence
  Description of Artificial Sequence: Synthetic oligonucleotide
ucgugauccuggucccaag

SEQ ID NO: 3005 - RNA, 19 nt, Artificial Sequence
  Description of Artificial Sequence: Synthetic oligonucleotide
gucgugauccuggucccaa

SEQ ID NO: 3006 - RNA, 19 nt, Artificial Sequence
  Description of Artificial Sequence: Synthetic oligonucleotide
ggucgugauccugguccca

SEQ ID NO: 3007 - RNA, 19 nt, Artificial Sequence
  Description of Artificial Sequence: Synthetic oligonucleotide
aggucgugauccugguccc

SEQ ID NO: 3008 - RNA, 19 nt, Artificial Sequence
  Description of Artificial Sequence: Synthetic oligonucleotide
gaggucgugauccuggucc

SEQ ID NO: 3009 - RNA, 19 nt, Artificial Sequence
  Description of Artificial Sequence: Synthetic oligonucleotide
ggaggucgugauccugguc

SEQ ID NO: 3010 - RNA, 19 nt, Artificial Sequence
  Description of Artificial Sequence: Synthetic oligonucleotide
cggaggucgugauccuggu

SEQ ID NO: 3011 - RNA, 19 nt, Artificial Sequence
  Description of Artificial Sequence: Synthetic oligonucleotide
gcggaggucgugauccugg

SEQ ID NO: 3012 - RNA, 19 nt, Artificial Sequence
  Description of Artificial Sequence: Synthetic oligonucleotide
ugcggaggucgugauccug

SEQ ID NO: 3013 - RNA, 19 nt, Artificial Sequence
  Description of Artificial Sequence: Synthetic oligonucleotide
cugcggaggucgugauccu

SEQ ID NO: 3014 - RNA, 19 nt, Artificial Sequence
  Description of Artificial Sequence: Synthetic oligonucleotide
ccugcggaggucgugaucc

SEQ ID NO: 3015 - RNA, 19 nt, Artificial Sequence
  Description of Artificial Sequence: Synthetic oligonucleotide
cccugcggaggucgugauc

SEQ ID NO: 3016 - RNA, 19 nt, Artificial Sequence
  Description of Artificial Sequence: Synthetic oligonucleotide
ucccugcggaggucgugau

SEQ ID NO: 3017 - RNA, 19 nt, Artificial Sequence
  Description of Artificial Sequence: Synthetic oligonucleotide
gucccugcggaggucguga

SEQ ID NO: 3018 - RNA, 19 nt, Artificial Sequence
  Description of Artificial Sequence: Synthetic oligonucleotide
ugucccugcggaggucgug

SEQ ID NO: 3019 - RNA, 19 nt, Artificial Sequence
  Description of Artificial Sequence: Synthetic oligonucleotide
uugucccugcggaggucgu

SEQ ID NO: 3020 - RNA, 19 nt, Artificial Sequence
  Description of Artificial Sequence: Synthetic oligonucleotide
cuugucccugcggaggucg

SEQ ID NO: 3021 - RNA, 19 nt, Artificial Sequence
  Description of Artificial Sequence: Synthetic oligonucleotide
ucuugucccugcggagguc

SEQ ID NO: 3022 - RNA, 19 nt, Artificial Sequence
  Description of Artificial Sequence: Synthetic oligonucleotide
uucuugucccugcggaggu

SEQ ID NO: 3023 - RNA, 19 nt, Artificial Sequence
  Description of Artificial Sequence: Synthetic oligonucleotide
guucuugucccugcggagg

SEQ ID NO: 3024 - RNA, 19 nt, Artificial Sequence
  Description of Artificial Sequence: Synthetic oligonucleotide
aguucuugucccugcggag

SEQ ID NO: 3025 - RNA, 19 nt, Artificial Sequence
  Description of Artificial Sequence: Synthetic oligonucleotide
caguucuugucccugcgga

SEQ ID NO: 3026 - RNA, 19 nt, Artificial Sequence
  Description of Artificial Sequence: Synthetic oligonucleotide
gcaguucuugucccugcgg

SEQ ID NO: 3027 - RNA, 19 nt, Artificial Sequence
  Description of Artificial Sequence: Synthetic oligonucleotide
cgcaguucuugucccugcg

SEQ ID NO: 3028 - RNA, 19 nt, Artificial Sequence
  Description of Artificial Sequence: Synthetic oligonucleotide
gcgcaguucuugucccugc

SEQ ID NO: 3029 - RNA, 19 nt, Artificial Sequence
  Description of Artificial Sequence: Synthetic oligonucleotide
ggcgcaguucuugucccug

SEQ ID NO: 3030 - RNA, 19 nt, Artificial Sequence
  Description of Artificial Sequence: Synthetic oligonucleotide
uggcgcaguucuugucccu

SEQ ID NO: 3031 - RNA, 19 nt, Artificial Sequence
  Description of Artificial Sequence: Synthetic oligonucleotide
uuggcgcaguucuuguccc

SEQ ID NO: 3032 - RNA, 19 nt, Artificial Sequence
  Description of Artificial Sequence: Synthetic oligonucleotide
cuuggcgcaguucuugucc

SEQ ID NO: 3033 - RNA, 19 nt, Artificial Sequence
  Description of Artificial Sequence: Synthetic oligonucleotide
ucuuggcgcaguucuuguc

SEQ ID NO: 3034 - RNA, 19 nt, Artificial Sequence
  Description of Artificial Sequence: Synthetic oligonucleotide
cucuuggcgcaguucuugu

SEQ ID NO: 3035 - RNA, 19 nt, Artificial Sequence
  Description of Artificial Sequence: Synthetic oligonucleotide
gcucuuggcgcaguucuug

SEQ ID NO: 3036 - RNA, 19 nt, Artificial Sequence
  Description of Artificial Sequence: Synthetic oligonucleotide
ggcucuuggcgcaguucuu

SEQ ID NO: 3037 - RNA, 19 nt, Artificial Sequence
  Description of Artificial Sequence: Synthetic oligonucleotide
aggcucuuggcgcaguucu

SEQ ID NO: 3038 - RNA, 19 nt, Artificial Sequence
  Description of Artificial Sequence: Synthetic oligonucleotide
gaggcucuuggcgcaguuc

SEQ ID NO: 3039 - RNA, 19 nt, Artificial Sequence
  Description of Artificial Sequence: Synthetic oligonucleotide
agaggcucuuggcgcaguu

SEQ ID NO: 3040 - RNA, 19 nt, Artificial Sequence
  Description of Artificial Sequence: Synthetic oligonucleotide
gagaggcucuuggcgcagu

SEQ ID NO: 3041 - RNA, 19 nt, Artificial Sequence
  Description of Artificial Sequence: Synthetic oligonucleotide
agagaggcucuuggcgcag

SEQ ID NO: 3042 - RNA, 19 nt, Artificial Sequence
  Description of Artificial Sequence: Synthetic oligonucleotide
cagagaggcucuuggcgca

SEQ ID NO: 3043 - RNA, 19 nt, Artificial Sequence
  Description of Artificial Sequence: Synthetic oligonucleotide
ccagagaggcucuuggcgc

SEQ ID NO: 3044 - RNA, 19 nt, Artificial Sequence
  Description of Artificial Sequence: Synthetic oligonucleotide
uccagagaggcucuuggcg

SEQ ID NO: 3045 - RNA, 19 nt, Artificial Sequence
  Description of Artificial Sequence: Synthetic oligonucleotide
cuccagagaggcucuuggc

SEQ ID NO: 3046 - RNA, 19 nt, Artificial Sequence
  Description of Artificial Sequence: Synthetic oligonucleotide
ccuccagagaggcucuugg

SEQ ID NO: 3047 - RNA, 19 nt, Artificial Sequence
  Description of Artificial Sequence: Synthetic oligonucleotide
gccuccagagaggcucuug

SEQ ID NO: 3048 - RNA, 19 nt, Artificial Sequence
  Description of Artificial Sequence: Synthetic oligonucleotide
agccuccagagaggcucuu

SEQ ID NO: 3049 - RNA, 19 nt, Artificial Sequence
  Description of Artificial Sequence: Synthetic oligonucleotide
cagccuccagagaggcucu

SEQ ID NO: 3050 - RNA, 19 nt, Artificial Sequence
  Description of Artificial Sequence: Synthetic oligonucleotide
ccagccuccagagaggcuc

SEQ ID NO: 3051 - RNA, 19 nt, Artificial Sequence
  Description of Artificial Sequence: Synthetic oligonucleotide
accagccuccagagaggcu

SEQ ID NO: 3052 - RNA, 19 nt, Artificial Sequence
  Description of Artificial Sequence: Synthetic oligonucleotide
caccagccuccagagaggc

SEQ ID NO: 3053 - RNA, 19 nt, Artificial Sequence
  Description of Artificial Sequence: Synthetic oligonucleotide
ccaccagccuccagagagg

SEQ ID NO: 3054 - RNA, 19 nt, Artificial Sequence
  Description of Artificial Sequence: Synthetic oligonucleotide
accaccagccuccagagag

SEQ ID NO: 3055 - RNA, 19 nt, Artificial Sequence
  Description of Artificial Sequence: Synthetic oligonucleotide
aaccaccagccuccagaga

SEQ ID NO: 3056 - RNA, 19 nt, Artificial Sequence
  Description of Artificial Sequence: Synthetic oligonucleotide
aaaccaccagccuccagag

SEQ ID NO: 3057 - RNA, 19 nt, Artificial Sequence
  Description of Artificial Sequence: Synthetic oligonucleotide
caaaccaccagccuccaga

SEQ ID NO: 3058 - RNA, 19 nt, Artificial Sequence
  Description of Artificial Sequence: Synthetic oligonucleotide
ccaaaccaccagccuccag

SEQ ID NO: 3059 - RNA, 19 nt, Artificial Sequence
  Description of Artificial Sequence: Synthetic oligonucleotide
gccaaaccaccagccucca

SEQ ID NO: 3060 - RNA, 19 nt, Artificial Sequence
  Description of Artificial Sequence: Synthetic oligonucleotide
ugccaaaccaccagccucc

SEQ ID NO: 3061 - RNA, 19 nt, Artificial Sequence
  Description of Artificial Sequence: Synthetic oligonucleotide
gugccaaaccaccagccuc

SEQ ID NO: 3062 - RNA, 19 nt, Artificial Sequence
  Description of Artificial Sequence: Synthetic oligonucleotide
ggugccaaaccaccagccu

SEQ ID NO: 3063 - RNA, 19 nt, Artificial Sequence
  Description of Artificial Sequence: Synthetic oligonucleotide
aggugccaaaccaccagcc

SEQ ID NO: 3064 - RNA, 19 nt, Artificial Sequence
  Description of Artificial Sequence: Synthetic oligonucleotide
caggugccaaaccaccagc

SEQ ID NO: 3065 - RNA, 19 nt, Artificial Sequence
  Description of Artificial Sequence: Synthetic oligonucleotide
gcaggugccaaaccaccag

SEQ ID NO: 3066 - RNA, 19 nt, Artificial Sequence
  Description of Artificial Sequence: Synthetic oligonucleotide
ugcaggugccaaaccacca

SEQ ID NO: 3067 - RNA, 19 nt, Artificial Sequence
  Description of Artificial Sequence: Synthetic oligonucleotide
cugcaggugccaaaccacc

SEQ ID NO: 3068 - RNA, 19 nt, Artificial Sequence
  Description of Artificial Sequence: Synthetic oligonucleotide
gcugcaggugccaaaccac

SEQ ID NO: 3069 - RNA, 19 nt, Artificial Sequence
  Description of Artificial Sequence: Synthetic oligonucleotide
ggcugcaggugccaaacca

SEQ ID NO: 3070 - RNA, 19 nt, Artificial Sequence
  Description of Artificial Sequence: Synthetic oligonucleotide
uggcugcaggugccaaacc

SEQ ID NO: 3071 - RNA, 19 nt, Artificial Sequence
  Description of Artificial Sequence: Synthetic oligonucleotide
auggcugcaggugccaaac

SEQ ID NO: 3072 - RNA, 19 nt, Artificial Sequence
  Description of Artificial Sequence: Synthetic oligonucleotide
aauggcugcaggugccaaa

SEQ ID NO: 3073 - RNA, 19 nt, Artificial Sequence
  Description of Artificial Sequence: Synthetic oligonucleotide
gaauggcugcaggugccaa

SEQ ID NO: 3074 - RNA, 19 nt, Artificial Sequence
  Description of Artificial Sequence: Synthetic oligonucleotide
ggaauggcugcaggugcca

SEQ ID NO: 3075 - RNA, 19 nt, Artificial Sequence
  Description of Artificial Sequence: Synthetic oligonucleotide
uggaauggcugcaggugcc

SEQ ID NO: 3076 - RNA, 19 nt, Artificial Sequence
  Description of Artificial Sequence: Synthetic oligonucleotide
uuggaauggcugcaggugc

SEQ ID NO: 3077 - RNA, 19 nt, Artificial Sequence
  Description of Artificial Sequence: Synthetic oligonucleotide
guuggaauggcugcaggug

SEQ ID NO: 3078 - RNA, 19 nt, Artificial Sequence
  Description of Artificial Sequence: Synthetic oligonucleotide
gguuggaauggcugcaggu

SEQ ID NO: 3079 - RNA, 19 nt, Artificial Sequence
  Description of Artificial Sequence: Synthetic oligonucleotide
agguuggaauggcugcagg

SEQ ID NO: 3080 - RNA, 19 nt, Artificial Sequence
  Description of Artificial Sequence: Synthetic oligonucleotide
gagguuggaauggcugcag

SEQ ID NO: 3081 - RNA, 19 nt, Artificial Sequence
  Description of Artificial Sequence: Synthetic oligonucleotide
ugagguuggaauggcugca

SEQ ID NO: 3082 - RNA, 19 nt, Artificial Sequence
  Description of Artificial Sequence: Synthetic oligonucleotide
uugagguuggaauggcugc

SEQ ID NO: 3083 - RNA, 19 nt, Artificial Sequence
  Description of Artificial Sequence: Synthetic oligonucleotide
guugagguuggaauggcug

SEQ ID NO: 3084 - RNA, 19 nt, Artificial Sequence
  Description of Artificial Sequence: Synthetic oligonucleotide
cguugagguuggaauggcu

SEQ ID NO: 3085 - RNA, 19 nt, Artificial Sequence
  Description of Artificial Sequence: Synthetic oligonucleotide
ccguugagguuggaauggc

SEQ ID NO: 3086 - RNA, 19 nt, Artificial Sequence
  Description of Artificial Sequence: Synthetic oligonucleotide
gccguugagguuggaaugg

SEQ ID NO: 3087 - RNA, 19 nt, Artificial Sequence
  Description of Artificial Sequence: Synthetic oligonucleotide
ggccguugagguuggaaug

SEQ ID NO: 3088 - RNA, 19 nt, Artificial Sequence
  Description of Artificial Sequence: Synthetic oligonucleotide
uggccguugagguuggaau

SEQ ID NO: 3089 - RNA, 19 nt, Artificial Sequence
  Description of Artificial Sequence: Synthetic oligonucleotide
cuggccguugagguuggaa

SEQ ID NO: 3090 - RNA, 19 nt, Artificial Sequence
  Description of Artificial Sequence: Synthetic oligonucleotide
acuggccguugagguugga

SEQ ID NO: 3091 - RNA, 19 nt, Artificial Sequence
  Description of Artificial Sequence: Synthetic oligonucleotide
uacuggccguugagguugg

SEQ ID NO: 3092 - RNA, 19 nt, Artificial Sequence
  Description of Artificial Sequence: Synthetic oligonucleotide
guacuggccguugagguug

SEQ ID NO: 3093 - RNA, 19 nt, Artificial Sequence
  Description of Artificial Sequence: Synthetic oligonucleotide
aguacuggccguugagguu

SEQ ID NO: 3094 - RNA, 19 nt, Artificial Sequence
  Description of Artificial Sequence: Synthetic oligonucleotide
aaguacuggccguugaggu

SEQ ID NO: 3095 - RNA, 19 nt, Artificial Sequence
  Description of Artificial Sequence: Synthetic oligonucleotide
gaaguacuggccguugagg

SEQ ID NO: 3096 - RNA, 19 nt, Artificial Sequence
  Description of Artificial Sequence: Synthetic oligonucleotide
ggaaguacuggccguugag

SEQ ID NO: 3097 - RNA, 19 nt, Artificial Sequence
  Description of Artificial Sequence: Synthetic oligonucleotide
cggaaguacuggccguuga

SEQ ID NO: 3098 - RNA, 19 nt, Artificial Sequence
  Description of Artificial Sequence: Synthetic oligonucleotide
gcggaaguacuggccguug

SEQ ID NO: 3099 - RNA, 19 nt, Artificial Sequence
  Description of Artificial Sequence: Synthetic oligonucleotide
agcggaaguacuggccguu

SEQ ID NO: 3100 - RNA, 19 nt, Artificial Sequence
  Description of Artificial Sequence: Synthetic oligonucleotide
gagcggaaguacuggccgu

SEQ ID NO: 3101 - RNA, 19 nt, Artificial Sequence
  Description of Artificial Sequence: Synthetic oligonucleotide
ggagcggaaguacuggccg

SEQ ID NO: 3102 - RNA, 19 nt, Artificial Sequence
  Description of Artificial Sequence: Synthetic oligonucleotide
uggagcggaaguacuggcc

SEQ ID NO: 3103 - RNA, 19 nt, Artificial Sequence
  Description of Artificial Sequence: Synthetic oligonucleotide
auggagcggaaguacuggc

SEQ ID NO: 3104 - RNA, 19 nt, Artificial Sequence
  Description of Artificial Sequence: Synthetic oligonucleotide
gauggagcggaaguacugg

SEQ ID NO: 3105 - RNA, 19 nt, Artificial Sequence
  Description of Artificial Sequence: Synthetic oligonucleotide
ggauggagcggaaguacug

SEQ ID NO: 3106 - RNA, 19 nt, Artificial Sequence
  Description of Artificial Sequence: Synthetic oligonucleotide
gggauggagcggaaguacu

SEQ ID NO: 3107 - RNA, 19 nt, Artificial Sequence
  Description of Artificial Sequence: Synthetic oligonucleotide
ugggauggagcggaaguac

SEQ ID NO: 3108 - RNA, 19 nt, Artificial Sequence
  Description of Artificial Sequence: Synthetic oligonucleotide
gugggauggagcggaagua

SEQ ID NO: 3109 - RNA, 19 nt, Artificial Sequence
  Description of Artificial Sequence: Synthetic oligonucleotide
ugugggauggagcggaagu

SEQ ID NO: 3110 - RNA, 19 nt, Artificial Sequence
  Description of Artificial Sequence: Synthetic oligonucleotide
cugugggauggagcggaag

SEQ ID NO: 3111 - RNA, 19 nt, Artificial Sequence
  Description of Artificial Sequence: Synthetic oligonucleotide
gcugugggauggagcggaa

SEQ ID NO: 3112 - RNA, 19 nt, Artificial Sequence
  Description of Artificial Sequence: Synthetic oligonucleotide
ugcugugggauggagcgga

SEQ ID NO: 3113 - RNA, 19 nt, Artificial Sequence
  Description of Artificial Sequence: Synthetic oligonucleotide
cugcugugggauggagcgg

SEQ ID NO: 3114 - RNA, 19 nt, Artificial Sequence
  Description of Artificial Sequence: Synthetic oligonucleotide
gcugcugugggauggagcg

SEQ ID NO: 3115 - RNA, 19 nt, Artificial Sequence
  Description of Artificial Sequence: Synthetic oligonucleotide
cgcugcugugggauggagc

SEQ ID NO: 3116 - RNA, 19 nt, Artificial Sequence
  Description of Artificial Sequence: Synthetic oligonucleotide
ccgcugcugugggauggag

SEQ ID NO: 3117 - RNA, 19 nt, Artificial Sequence
  Description of Artificial Sequence: Synthetic oligonucleotide
gccgcugcugugggaugga

SEQ ID NO: 3118 - RNA, 19 nt, Artificial Sequence
  Description of Artificial Sequence: Synthetic oligonucleotide
ugccgcugcugugggaugg

SEQ ID NO: 3119 - RNA, 19 nt, Artificial Sequence
  Description of Artificial Sequence: Synthetic oligonucleotide
cugccgcugcugugggaug

SEQ ID NO: 3120 - RNA, 19 nt, Artificial Sequence
  Description of Artificial Sequence: Synthetic oligonucleotide
ucugccgcugcugugggau

SEQ ID NO: 3121 - RNA, 19 nt, Artificial Sequence
  Description of Artificial Sequence: Synthetic oligonucleotide
uucugccgcugcuguggga

SEQ ID NO: 3122 - RNA, 19 nt, Artificial Sequence
  Description of Artificial Sequence: Synthetic oligonucleotide
cuucugccgcugcuguggg

SEQ ID NO: 3123 - RNA, 19 nt, Artificial Sequence
  Description of Artificial Sequence: Synthetic oligonucleotide
gcuucugccgcugcugugg

SEQ ID NO: 3124 - RNA, 19 nt, Artificial Sequence
  Description of Artificial Sequence: Synthetic oligonucleotide
agcuucugccgcugcugug

SEQ ID NO: 3125 - RNA, 19 nt, Artificial Sequence
  Description of Artificial Sequence: Synthetic oligonucleotide
aagcuucugccgcugcugu

SEQ ID NO: 3126 - RNA, 19 nt, Artificial Sequence
  Description of Artificial Sequence: Synthetic oligonucleotide
uaagcuucugccgcugcug

SEQ ID NO: 3127 - RNA, 19 nt, Artificial Sequence
  Description of Artificial Sequence: Synthetic oligonucleotide
uuaagcuucugccgcugcu

SEQ ID NO: 3128 - RNA, 19 nt, Artificial Sequence
  Description of Artificial Sequence: Synthetic oligonucleotide
cuuaagcuucugccgcugc

SEQ ID NO: 3129 - RNA, 19 nt, Artificial Sequence
  Description of Artificial Sequence: Synthetic oligonucleotide
ucuuaagcuucugccgcug

SEQ ID NO: 3130 - RNA, 19 nt, Artificial Sequence
  Description of Artificial Sequence: Synthetic oligonucleotide
uucuuaagcuucugccgcu

SEQ ID NO: 3131 - RNA, 19 nt, Artificial Sequence
  Description of Artificial Sequence: Synthetic oligonucleotide
cuucuuaagcuucugccgc

SEQ ID NO: 3132 - RNA, 19 nt, Artificial Sequence
  Description of Artificial Sequence: Synthetic oligonucleotide
ccuucuuaagcuucugccg

SEQ ID NO: 3133 - RNA, 19 nt, Artificial Sequence
  Description of Artificial Sequence: Synthetic oligonucleotide
cccuucuuaagcuucugcc

SEQ ID NO: 3134 - RNA, 19 nt, Artificial Sequence
  Description of Artificial Sequence: Synthetic oligonucleotide
ucccuucuuaagcuucugc

SEQ ID NO: 3135 - RNA, 19 nt, Artificial Sequence
  Description of Artificial Sequence: Synthetic oligonucleotide
uucccuucuuaagcuucug

SEQ ID NO: 3136 - RNA, 19 nt, Artificial Sequence
  Description of Artificial Sequence: Synthetic oligonucleotide
auucccuucuuaagcuucu

SEQ ID NO: 3137 - RNA, 19 nt, Artificial Sequence
  Description of Artificial Sequence: Synthetic oligonucleotide
gauucccuucuuaagcuuc

SEQ ID NO: 3138 - RNA, 19 nt, Artificial Sequence
  Description of Artificial Sequence: Synthetic oligonucleotide
agauucccuucuuaagcuu

SEQ ID NO: 3139 - RNA, 19 nt, Artificial Sequence
  Description of Artificial Sequence: Synthetic oligonucleotide
aagauucccuucuuaagcu

SEQ ID NO: 3140 - RNA, 19 nt, Artificial Sequence
  Description of Artificial Sequence: Synthetic oligonucleotide
gaagauucccuucuuaagc

SEQ ID NO: 3141 - RNA, 19 nt, Artificial Sequence
  Description of Artificial Sequence: Synthetic oligonucleotide
agaagauucccuucuuaag

SEQ ID NO: 3142 - RNA, 19 nt, Artificial Sequence
  Description of Artificial Sequence: Synthetic oligonucleotide
cagaagauucccuucuuaa

SEQ ID NO: 3143 - RNA, 19 nt, Artificial Sequence
  Description of Artificial Sequence: Synthetic oligonucleotide
ccagaagauucccuucuua

SEQ ID NO: 3144 - RNA, 19 nt, Artificial Sequence
  Description of Artificial Sequence: Synthetic oligonucleotide
uccagaagauucccuucuu

SEQ ID NO: 3145 - RNA, 19 nt, Artificial Sequence
  Description of Artificial Sequence: Synthetic oligonucleotide
uuccagaagauucccuucu

SEQ ID NO: 3146 - RNA, 19 nt, Artificial Sequence
  Description of Artificial Sequence: Synthetic oligonucleotide
cuuccagaagauucccuuc

SEQ ID NO: 3147 - RNA, 19 nt, Artificial Sequence
  Description of Artificial Sequence: Synthetic oligonucleotide
ucuuccagaagauucccuu

SEQ ID NO: 3148 - RNA, 19 nt, Artificial Sequence
  Description of Artificial Sequence: Synthetic oligonucleotide
gucuuccagaagauucccu

SEQ ID NO: 3149 - RNA, 19 nt, Artificial Sequence
  Description of Artificial Sequence: Synthetic oligonucleotide
ggucuuccagaagauuccc

SEQ ID NO: 3150 - RNA, 19 nt, Artificial Sequence
  Description of Artificial Sequence: Synthetic oligonucleotide
aggucuuccagaagauucc

SEQ ID NO: 3151 - RNA, 19 nt, Artificial Sequence
  Description of Artificial Sequence: Synthetic oligonucleotide
caggucuuccagaagauuc

SEQ ID NO: 3152 - RNA, 19 nt, Artificial Sequence
  Description of Artificial Sequence: Synthetic oligonucleotide
ccaggucuuccagaagauu

SEQ ID NO: 3153 - RNA, 19 nt, Artificial Sequence
  Description of Artificial Sequence: Synthetic oligonucleotide
gccaggucuuccagaagau

SEQ ID NO: 3154 - RNA, 19 nt, Artificial Sequence
  Description of Artificial Sequence: Synthetic oligonucleotide
cgccaggucuuccagaaga

SEQ ID NO: 3155 - RNA, 19 nt, Artificial Sequence
  Description of Artificial Sequence: Synthetic oligonucleotide
ccgccaggucuuccagaag

SEQ ID NO: 3156 - RNA, 19 nt, Artificial Sequence
  Description of Artificial Sequence: Synthetic oligonucleotide
cccgccaggucuuccagaa

SEQ ID NO: 3157 - RNA, 19 nt, Artificial Sequence
  Description of Artificial Sequence: Synthetic oligonucleotide
ccccgccaggucuuccaga

SEQ ID NO: 3158 - RNA, 19 nt, Artificial Sequence
  Description of Artificial Sequence: Synthetic oligonucleotide
gccccgccaggucuuccag

SEQ ID NO: 3159 - RNA, 19 nt, Artificial Sequence
  Description of Artificial Sequence: Synthetic oligonucleotide
ggccccgccaggucuucca

SEQ ID NO: 3160 - RNA, 19 nt, Artificial Sequence
  Description of Artificial Sequence: Synthetic oligonucleotide
cggccccgccaggucuucc

SEQ ID NO: 3161 - RNA, 19 nt, Artificial Sequence
  Description of Artificial Sequence: Synthetic oligonucleotide
gcggccccgccaggucuuc

SEQ ID NO: 3162 - RNA, 19 nt, Artificial Sequence
  Description of Artificial Sequence: Synthetic oligonucleotide
agcggccccgccaggucuu

SEQ ID NO: 3163 - RNA, 19 nt, Artificial Sequence
  Description of Artificial Sequence: Synthetic oligonucleotide
uagcggccccgccaggucu

SEQ ID NO: 3164 - RNA, 19 nt, Artificial Sequence
  Description of Artificial Sequence: Synthetic oligonucleotide
guagcggccccgccagguc

SEQ ID NO: 3165 - RNA, 19 nt, Artificial Sequence
  Description of Artificial Sequence: Synthetic oligonucleotide
aguagcggccccgccaggu

SEQ ID NO: 3166 - RNA, 19 nt, Artificial Sequence
  Description of Artificial Sequence: Synthetic oligonucleotide
uaguagcggccccgccagg

SEQ ID NO: 3167 - RNA, 19 nt, Artificial Sequence
  Description of Artificial Sequence: Synthetic oligonucleotide
guaguagcggccccgccag

SEQ ID NO: 3168 - RNA, 19 nt, Artificial Sequence
  Description of Artificial Sequence: Synthetic oligonucleotide
gguaguagcggccccgcca

SEQ ID NO: 3169 - RNA, 19 nt, Artificial Sequence
  Description of Artificial Sequence: Synthetic oligonucleotide
ggguaguagcggccccgcc

SEQ ID NO: 3170 - RNA, 19 nt, Artificial Sequence
  Description of Artificial Sequence: Synthetic oligonucleotide
cggguaguagcggccccgc

SEQ ID NO: 3171 - RNA, 19 nt, Artificial Sequence
  Description of Artificial Sequence: Synthetic oligonucleotide
gcggguaguagcggccccg

SEQ ID NO: 3172 - RNA, 19 nt, Artificial Sequence
  Description of Artificial Sequence: Synthetic oligonucleotide
agcggguaguagcggcccc

SEQ ID NO: 3173 - RNA, 19 nt, Artificial Sequence
  Description of Artificial Sequence: Synthetic oligonucleotide
cagcggguaguagcggccc

SEQ ID NO: 3174 - RNA, 19 nt, Artificial Sequence
  Description of Artificial Sequence: Synthetic oligonucleotide
gcagcggguaguagcggcc

SEQ ID NO: 3175 - RNA, 19 nt, Artificial Sequence
  Description of Artificial Sequence: Synthetic oligonucleotide
ugcagcggguaguagcggc

SEQ ID NO: 3176 - RNA, 19 nt, Artificial Sequence
  Description of Artificial Sequence: Synthetic oligonucleotide
cugcagcggguaguagcgg

SEQ ID NO: 3177 - RNA, 19 nt, Artificial Sequence
  Description of Artificial Sequence: Synthetic oligonucleotide
ccugcagcggguaguagcg

SEQ ID NO: 3178 - RNA, 19 nt, Artificial Sequence
  Description of Artificial Sequence: Synthetic oligonucleotide
gccugcagcggguaguagc

SEQ ID NO: 3179 - RNA, 19 nt, Artificial Sequence
  Description of Artificial Sequence: Synthetic oligonucleotide
ggccugcagcggguaguag

SEQ ID NO: 3180 - RNA, 19 nt, Artificial Sequence
  Description of Artificial Sequence: Synthetic oligonucleotide
uggccugcagcggguagua

SEQ ID NO: 3181 - RNA, 19 nt, Artificial Sequence
  Description of Artificial Sequence: Synthetic oligonucleotide
guggccugcagcggguagu

SEQ ID NO: 3182 - RNA, 19 nt, Artificial Sequence
  Description of Artificial Sequence: Synthetic oligonucleotide
gguggccugcagcggguag

SEQ ID NO: 3183 - RNA, 19 nt, Artificial Sequence
  Description of Artificial Sequence: Synthetic oligonucleotide
ugguggccugcagcgggua

SEQ ID NO: 3184 - RNA, 19 nt, Artificial Sequence
  Description of Artificial Sequence: Synthetic oligonucleotide
gugguggccugcagcgggu

SEQ ID NO: 3185 - RNA, 19 nt, Artificial Sequence
  Description of Artificial Sequence: Synthetic oligonucleotide
ggugguggccugcagcggg

SEQ ID NO: 3186 - RNA, 19 nt, Artificial Sequence
  Description of Artificial Sequence: Synthetic oligonucleotide
uggugguggccugcagcgg

SEQ ID NO: 3187 - RNA, 19 nt, Artificial Sequence
  Description of Artificial Sequence: Synthetic oligonucleotide
auggugguggccugcagcg

SEQ ID NO: 3188 - RNA, 19 nt, Artificial Sequence
  Description of Artificial Sequence: Synthetic oligonucleotide
cauggugguggccugcagc

SEQ ID NO: 3189 - RNA, 19 nt, Artificial Sequence
  Description of Artificial Sequence: Synthetic oligonucleotide
acauggugguggccugcag

SEQ ID NO: 3190 - RNA, 19 nt, Artificial Sequence
  Description of Artificial Sequence: Synthetic oligonucleotide
aacauggugguggccugca

SEQ ID NO: 3191 - RNA, 19 nt, Artificial Sequence
  Description of Artificial Sequence: Synthetic oligonucleotide
caacauggugguggccugc

SEQ ID NO: 3192 - RNA, 19 nt, Artificial Sequence
  Description of Artificial Sequence: Synthetic oligonucleotide
ucaacauggugguggccug

SEQ ID NO: 3193 - RNA, 19 nt, Artificial Sequence
  Description of Artificial Sequence: Synthetic oligonucleotide
aucaacauggugguggccu

SEQ ID NO: 3194 - RNA, 19 nt, Artificial Sequence
  Description of Artificial Sequence: Synthetic oligonucleotide
gaucaacauggugguggcc

SEQ ID NO: 3195 - RNA, 19 nt, Artificial Sequence
  Description of Artificial Sequence: Synthetic oligonucleotide
ggaucaacauggugguggc

SEQ ID NO: 3196 - RNA, 19 nt, Artificial Sequence
  Description of Artificial Sequence: Synthetic oligonucleotide
uggaucaacaugguggugg

SEQ ID NO: 3197 - RNA, 19 nt, Artificial Sequence
  Description of Artificial Sequence: Synthetic oligonucleotide
cuggaucaacaugguggug

SEQ ID NO: 3198 - RNA, 19 nt, Artificial Sequence
  Description of Artificial Sequence: Synthetic oligonucleotide
gcuggaucaacaugguggu

SEQ ID NO: 3199 - RNA, 19 nt, Artificial Sequence
  Description of Artificial Sequence: Synthetic oligonucleotide
ggcuggaucaacauggugg

SEQ ID NO: 3200 - RNA, 19 nt, Artificial Sequence
  Description of Artificial Sequence: Synthetic oligonucleotide
gggcuggaucaacauggug

SEQ ID NO: 3201 - RNA, 19 nt, Artificial Sequence
  Description of Artificial Sequence: Synthetic oligonucleotide
ugggcuggaucaacauggu

SEQ ID NO: 3202 - RNA, 19 nt, Artificial Sequence
  Description of Artificial Sequence: Synthetic oligonucleotide
augggcuggaucaacaugg

SEQ ID NO: 3203 - RNA, 19 nt, Artificial Sequence
  Description of Artificial Sequence: Synthetic oligonucleotide
caugggcuggaucaacaug

SEQ ID NO: 3204 - RNA, 19 nt, Artificial Sequence
  Description of Artificial Sequence: Synthetic oligonucleotide
ccaugggcuggaucaacau

SEQ ID NO: 3205 - RNA, 19 nt, Artificial Sequence
  Description of Artificial Sequence: Synthetic oligonucleotide
gccaugggcuggaucaaca

SEQ ID NO: 3206 - RNA, 19 nt, Artificial Sequence
  Description of Artificial Sequence: Synthetic oligonucleotide
ugccaugggcuggaucaac

SEQ ID NO: 3207 - RNA, 19 nt, Artificial Sequence
  Description of Artificial Sequence: Synthetic oligonucleotide
cugccaugggcuggaucaa

SEQ ID NO: 3208 - RNA, 19 nt, Artificial Sequence
  Description of Artificial Sequence: Synthetic oligonucleotide
gcugccaugggcuggauca

SEQ ID NO: 3209 - RNA, 19 nt, Artificial Sequence
  Description of Artificial Sequence: Synthetic oligonucleotide
ugcugccaugggcuggauc

SEQ ID NO: 3210 - RNA, 19 nt, Artificial Sequence
  Description of Artificial Sequence: Synthetic oligonucleotide
cugcugccaugggcuggau

SEQ ID NO: 3211 - RNA, 19 nt, Artificial Sequence
  Description of Artificial Sequence: Synthetic oligonucleotide
ucugcugccaugggcugga

SEQ ID NO: 3212 - RNA, 19 nt, Artificial Sequence
  Description of Artificial Sequence: Synthetic oligonucleotide
cucugcugccaugggcugg

SEQ ID NO: 3213 - RNA, 19 nt, Artificial Sequence
  Description of Artificial Sequence: Synthetic oligonucleotide
ccucugcugccaugggcug

SEQ ID NO: 3214 - RNA, 19 nt, Artificial Sequence
  Description of Artificial Sequence: Synthetic oligonucleotide
gccucugcugccaugggcu

SEQ ID NO: 3215 - RNA, 19 nt, Artificial Sequence
  Description of Artificial Sequence: Synthetic oligonucleotide
ugccucugcugccaugggc

SEQ ID NO: 3216 - RNA, 19 nt, Artificial Sequence
  Description of Artificial Sequence: Synthetic oligonucleotide
cugccucugcugccauggg

SEQ ID NO: 3217 - RNA, 19 nt, Artificial Sequence
  Description of Artificial Sequence: Synthetic oligonucleotide
gcugccucugcugccaugg

SEQ ID NO: 3218 - RNA, 19 nt, Artificial Sequence
  Description of Artificial Sequence: Synthetic oligonucleotide
ggcugccucugcugccaug

SEQ ID NO: 3219 - RNA, 19 nt, Artificial Sequence
  Description of Artificial Sequence: Synthetic oligonucleotide
aggcugccucugcugccau

SEQ ID NO: 3220 - RNA, 19 nt, Artificial Sequence
  Description of Artificial Sequence: Synthetic oligonucleotide
gaggcugccucugcugcca

SEQ ID NO: 3221 - RNA, 19 nt, Artificial Sequence
  Description of Artificial Sequence: Synthetic oligonucleotide
ggaggcugccucugcugcc

SEQ ID NO: 3222 - RNA, 19 nt, Artificial Sequence
  Description of Artificial Sequence: Synthetic oligonucleotide
aggaggcugccucugcugc

SEQ ID NO: 3223 - RNA, 19 nt, Artificial Sequence
  Description of Artificial Sequence: Synthetic oligonucleotide
uaggaggcugccucugcug

SEQ ID NO: 3224 - RNA, 19 nt, Artificial Sequence
  Description of Artificial Sequence: Synthetic oligonucleotide
cuaggaggcugccucugcu

SEQ ID NO: 3225 - RNA, 19 nt, Artificial Sequence
  Description of Artificial Sequence: Synthetic oligonucleotide
gcuaggaggcugccucugc

SEQ ID NO: 3226 - RNA, 19 nt, Artificial Sequence
  Description of Artificial Sequence: Synthetic oligonucleotide
cgcuaggaggcugccucug

SEQ ID NO: 3227 - RNA, 19 nt, Artificial Sequence
  Description of Artificial Sequence: Synthetic oligonucleotide
acgcuaggaggcugccucu

SEQ ID NO: 3228 - RNA, 19 nt, Artificial Sequence
  Description of Artificial Sequence: Synthetic oligonucleotide
gacgcuaggaggcugccuc

SEQ ID NO: 3229 - RNA, 19 nt, Artificial Sequence
  Description of Artificial Sequence: Synthetic oligonucleotide
ggacgcuaggaggcugccu

SEQ ID NO: 3230 - RNA, 19 nt, Artificial Sequence
  Description of Artificial Sequence: Synthetic oligonucleotide
aggacgcuaggaggcugcc

SEQ ID NO: 3231 - RNA, 19 nt, Artificial Sequence
  Description of Artificial Sequence: Synthetic oligonucleotide
caggacgcuaggaggcugc

SEQ ID NO: 3232 - RNA, 19 nt, Artificial Sequence
  Description of Artificial Sequence: Synthetic oligonucleotide
ccaggacgcuaggaggcug

SEQ ID NO: 3233 - RNA, 19 nt, Artificial Sequence
  Description of Artificial Sequence: Synthetic oligonucleotide
gccaggacgcuaggaggcu

SEQ ID NO: 3234 - RNA, 19 nt, Artificial Sequence
  Description of Artificial Sequence: Synthetic oligonucleotide
agccaggacgcuaggaggc

SEQ ID NO: 3235 - RNA, 19 nt, Artificial Sequence
  Description of Artificial Sequence: Synthetic oligonucleotide
cagccaggacgcuaggagg

SEQ ID NO: 3236 - RNA, 19 nt, Artificial Sequence
  Description of Artificial Sequence: Synthetic oligonucleotide
ccagccaggacgcuaggag

SEQ ID NO: 3237 - RNA, 19 nt, Artificial Sequence
  Description of Artificial Sequence: Synthetic oligonucleotide
cccagccaggacgcuagga

SEQ ID NO: 3238 - RNA, 19 nt, Artificial Sequence
  Description of Artificial Sequence: Synthetic oligonucleotide
gcccagccaggacgcuagg

SEQ ID NO: 3239 - RNA, 19 nt, Artificial Sequence
  Description of Artificial Sequence: Synthetic oligonucleotide
ggcccagccaggacgcuag

SEQ ID NO: 3240 - RNA, 19 nt, Artificial Sequence
  Description of Artificial Sequence: Synthetic oligonucleotide
aggcccagccaggacgcua

SEQ ID NO: 3241 - RNA, 19 nt, Artificial Sequence
  Description of Artificial Sequence: Synthetic oligonucleotide
caggcccagccaggacgcu

SEQ ID NO: 3242 - RNA, 19 nt, Artificial Sequence
  Description of Artificial Sequence: Synthetic oligonucleotide
ccaggcccagccaggacgc

SEQ ID NO: 3243 - RNA, 19 nt, Artificial Sequence
  Description of Artificial Sequence: Synthetic oligonucleotide
accaggcccagccaggacg

SEQ ID NO: 3244 - RNA, 19 nt, Artificial Sequence
  Description of Artificial Sequence: Synthetic oligonucleotide
gaccaggcccagccaggac

SEQ ID NO: 3245 - RNA, 19 nt, Artificial Sequence
  Description of Artificial Sequence: Synthetic oligonucleotide
ggaccaggcccagccagga

SEQ ID NO: 3246 - RNA, 19 nt, Artificial Sequence
  Description of Artificial Sequence: Synthetic oligonucleotide
gggaccaggcccagccagg

SEQ ID NO: 3247 - RNA, 19 nt, Artificial Sequence
  Description of Artificial Sequence: Synthetic oligonucleotide
ugggaccaggcccagccag

SEQ ID NO: 3248 - RNA, 19 nt, Artificial Sequence
  Description of Artificial Sequence: Synthetic oligonucleotide
cugggaccaggcccagcca

SEQ ID NO: 3249 - RNA, 19 nt, Artificial Sequence
  Description of Artificial Sequence: Synthetic oligonucleotide
ccugggaccaggcccagcc

SEQ ID NO: 3250 - RNA, 19 nt, Artificial Sequence
  Description of Artificial Sequence: Synthetic oligonucleotide
gccugggaccaggcccagc

SEQ ID NO: 3251 - RNA, 19 nt, Artificial Sequence
  Description of Artificial Sequence: Synthetic oligonucleotide
ggccugggaccaggcccag

SEQ ID NO: 3252 - RNA, 19 nt, Artificial Sequence
  Description of Artificial Sequence: Synthetic oligonucleotide
gggccugggaccaggccca

SEQ ID NO: 3253 - RNA, 19 nt, Artificial Sequence
  Description of Artificial Sequence: Synthetic oligonucleotide
ugggccugggaccaggccc

SEQ ID NO: 3254 - RNA, 19 nt, Artificial Sequence
  Description of Artificial Sequence: Synthetic oligonucleotide
gugggccugggaccaggcc

SEQ ID NO: 3255 - RNA, 19 nt, Artificial Sequence
  Description of Artificial Sequence: Synthetic oligonucleotide
cgugggccugggaccaggc

SEQ ID NO: 3256 - RNA, 19 nt, Artificial Sequence
  Description of Artificial Sequence: Synthetic oligonucleotide
ucgugggccugggaccagg

SEQ ID NO: 3257 - RNA, 19 nt, Artificial Sequence
  Description of Artificial Sequence: Synthetic oligonucleotide
uucgugggccugggaccag

SEQ ID NO: 3258 - RNA, 19 nt, Artificial Sequence
  Description of Artificial Sequence: Synthetic oligonucleotide
uuucgugggccugggacca

SEQ ID NO: 3259 - RNA, 19 nt, Artificial Sequence
  Description of Artificial Sequence: Synthetic oligonucleotide
cuuucgugggccugggacc

SEQ ID NO: 3260 - RNA, 19 nt, Artificial Sequence
  Description of Artificial Sequence: Synthetic oligonucleotide
ucuuucgugggccugggac

SEQ ID NO: 3261 - RNA, 19 nt, Artificial Sequence
  Description of Artificial Sequence: Synthetic oligonucleotide
gucuuucgugggccuggga

SEQ ID NO: 3262 - RNA, 19 nt, Artificial Sequence
  Description of Artificial Sequence: Synthetic oligonucleotide
cgucuuucgugggccuggg

SEQ ID NO: 3263 - RNA, 19 nt, Artificial Sequence
  Description of Artificial Sequence: Synthetic oligonucleotide
ccgucuuucgugggccugg

SEQ ID NO: 3264 - RNA, 19 nt, Artificial Sequence
  Description of Artificial Sequence: Synthetic oligonucleotide
accgucuuucgugggccug

SEQ ID NO: 3265 - RNA, 19 nt, Artificial Sequence
  Description of Artificial Sequence: Synthetic oligonucleotide
caccgucuuucgugggccu

SEQ ID NO: 3266 - RNA, 19 nt, Artificial Sequence
  Description of Artificial Sequence: Synthetic oligonucleotide
ucaccgucuuucgugggcc

SEQ ID NO: 3267 - RNA, 19 nt, Artificial Sequence
  Description of Artificial Sequence: Synthetic oligonucleotide
gucaccgucuuucgugggc

SEQ ID NO: 3268 - RNA, 19 nt, Artificial Sequence
  Description of Artificial Sequence: Synthetic oligonucleotide
agucaccgucuuucguggg

SEQ ID NO: 3269 - RNA, 19 nt, Artificial Sequence
  Description of Artificial Sequence: Synthetic oligonucleotide
gagucaccgucuuucgugg

SEQ ID NO: 3270 - RNA, 19 nt, Artificial Sequence
  Description of Artificial Sequence: Synthetic oligonucleotide
agagucaccgucuuucgug

SEQ ID NO: 3271 - RNA, 19 nt, Artificial Sequence
  Description of Artificial Sequence: Synthetic oligonucleotide
aagagucaccgucuuucgu

SEQ ID NO: 3272 - RNA, 19 nt, Artificial Sequence
  Description of Artificial Sequence: Synthetic oligonucleotide
caagagucaccgucuuucg

SEQ ID NO: 3273 - RNA, 19 nt, Artificial Sequence
  Description of Artificial Sequence: Synthetic oligonucleotide
ccaagagucaccgucuuuc

SEQ ID NO: 3274 - RNA, 19 nt, Artificial Sequence
  Description of Artificial Sequence: Synthetic oligonucleotide
gccaagagucaccgucuuu

SEQ ID NO: 3275 - RNA, 19 nt, Artificial Sequence
  Description of Artificial Sequence: Synthetic oligonucleotide
agccaagagucaccgucuu

SEQ ID NO: 3276 - RNA, 19 nt, Artificial Sequence
  Description of Artificial Sequence: Synthetic oligonucleotide
gagccaagagucaccgucu

SEQ ID NO: 3277 - RNA, 19 nt, Artificial Sequence
  Description of Artificial Sequence: Synthetic oligonucleotide
agagccaagagucaccguc

SEQ ID NO: 3278 - RNA, 19 nt, Artificial Sequence
  Description of Artificial Sequence: Synthetic oligonucleotide
cagagccaagagucaccgu

SEQ ID NO: 3279 - RNA, 19 nt, Artificial Sequence
  Description of Artificial Sequence: Synthetic oligonucleotide
gcagagccaagagucaccg

SEQ ID NO: 3280 - RNA, 19 nt, Artificial Sequence
  Description of Artificial Sequence: Synthetic oligonucleotide
ggcagagccaagagucacc

SEQ ID NO: 3281 - RNA, 19 nt, Artificial Sequence
  Description of Artificial Sequence: Synthetic oligonucleotide
gggcagagccaagagucac

SEQ ID NO: 3282 - RNA, 19 nt, Artificial Sequence
  Description of Artificial Sequence: Synthetic oligonucleotide
cgggcagagccaagaguca

SEQ ID NO: 3283 - RNA, 19 nt, Artificial Sequence
  Description of Artificial Sequence: Synthetic oligonucleotide
ucgggcagagccaagaguc

SEQ ID NO: 3284 - RNA, 19 nt, Artificial Sequence
  Description of Artificial Sequence: Synthetic oligonucleotide
cucgggcagagccaagagu

SEQ ID NO: 3285 - RNA, 19 nt, Artificial Sequence
  Description of Artificial Sequence: Synthetic oligonucleotide
ccucgggcagagccaagag

SEQ ID NO: 3286 - RNA, 19 nt, Artificial Sequence
  Description of Artificial Sequence: Synthetic oligonucleotide
uccucgggcagagccaaga

SEQ ID NO: 3287 - RNA, 19 nt, Artificial Sequence
  Description of Artificial Sequence: Synthetic oligonucleotide
auccucgggcagagccaag

SEQ ID NO: 3288 - RNA, 19 nt, Artificial Sequence
  Description of Artificial Sequence: Synthetic oligonucleotide
cauccucgggcagagccaa

SEQ ID NO: 3289 - RNA, 19 nt, Artificial Sequence
  Description of Artificial Sequence: Synthetic oligonucleotide
acauccucgggcagagcca

SEQ ID NO: 3290 - RNA, 19 nt, Artificial Sequence
  Description of Artificial Sequence: Synthetic oligonucleotide
cacauccucgggcagagcc

SEQ ID NO: 3291 - RNA, 19 nt, Artificial Sequence
  Description of Artificial Sequence: Synthetic oligonucleotide
ccacauccucgggcagagc

SEQ ID NO: 3292 - RNA, 19 nt, Artificial Sequence
  Description of Artificial Sequence: Synthetic oligonucleotide
gccacauccucgggcagag

SEQ ID NO: 3293 - RNA, 19 nt, Artificial Sequence
  Description of Artificial Sequence: Synthetic oligonucleotide
ggccacauccucgggcaga

SEQ ID NO: 3294 - RNA, 19 nt, Artificial Sequence
  Description of Artificial Sequence: Synthetic oligonucleotide
cggccacauccucgggcag

SEQ ID NO: 3295 - RNA, 19 nt, Artificial Sequence
  Description of Artificial Sequence: Synthetic oligonucleotide
acggccacauccucgggca

SEQ ID NO: 3296 - RNA, 19 nt, Artificial Sequence
  Description of Artificial Sequence: Synthetic oligonucleotide
aacggccacauccucgggc

SEQ ID NO: 3297 - RNA, 19 nt, Artificial Sequence
  Description of Artificial Sequence: Synthetic oligonucleotide
gaacggccacauccucggg

SEQ ID NO: 3298 - RNA, 19 nt, Artificial Sequence
  Description of Artificial Sequence: Synthetic oligonucleotide
ggaacggccacauccucgg

SEQ ID NO: 3299 - RNA, 19 nt, Artificial Sequence
  Description of Artificial Sequence: Synthetic oligonucleotide
gggaacggccacauccucg

SEQ ID NO: 3300 - RNA, 19 nt, Artificial Sequence
  Description of Artificial Sequence: Synthetic oligonucleotide
agggaacggccacauccuc

SEQ ID NO: 3301 - RNA, 19 nt, Artificial Sequence
  Description of Artificial Sequence: Synthetic oligonucleotide
cagggaacggccacauccu

SEQ ID NO: 3302 - RNA, 19 nt, Artificial Sequence
  Description of Artificial Sequence: Synthetic oligonucleotide
gcagggaacggccacaucc

SEQ ID NO: 3303 - RNA, 19 nt, Artificial Sequence
  Description of Artificial Sequence: Synthetic oligonucleotide
ggcagggaacggccacauc

SEQ ID NO: 3304 - RNA, 19 nt, Artificial Sequence
  Description of Artificial Sequence: Synthetic oligonucleotide
aggcagggaacggccacau

SEQ ID NO: 3305 - RNA, 19 nt, Artificial Sequence
  Description of Artificial Sequence: Synthetic oligonucleotide
caggcagggaacggccaca

SEQ ID NO: 3306 - RNA, 19 nt, Artificial Sequence
  Description of Artificial Sequence: Synthetic oligonucleotide
ccaggcagggaacggccac

SEQ ID NO: 3307 - RNA, 19 nt, Artificial Sequence
  Description of Artificial Sequence: Synthetic oligonucleotide
cccaggcagggaacggcca

SEQ ID NO: 3308 - RNA, 19 nt, Artificial Sequence
  Description of Artificial Sequence: Synthetic oligonucleotide
gcccaggcagggaacggcc

SEQ ID NO: 3309 - RNA, 19 nt, Artificial Sequence
  Description of Artificial Sequence: Synthetic oligonucleotide
ugcccaggcagggaacggc

SEQ ID NO: 3310 - RNA, 19 nt, Artificial Sequence
  Description of Artificial Sequence: Synthetic oligonucleotide
cugcccaggcagggaacgg

SEQ ID NO: 3311 - RNA, 19 nt, Artificial Sequence
  Description of Artificial Sequence: Synthetic oligonucleotide
ccugcccaggcagggaacg

SEQ ID NO: 3312 - RNA, 19 nt, Artificial Sequence
  Description of Artificial Sequence: Synthetic oligonucleotide
cccugcccaggcagggaac

SEQ ID NO: 3313 - RNA, 19 nt, Artificial Sequence
  Description of Artificial Sequence: Synthetic oligonucleotide
ccccugcccaggcagggaa

SEQ ID NO: 3314 - RNA, 19 nt, Artificial Sequence
  Description of Artificial Sequence: Synthetic oligonucleotide
gccccugcccaggcaggga

SEQ ID NO: 3315 - RNA, 19 nt, Artificial Sequence
  Description of Artificial Sequence: Synthetic oligonucleotide
agccccugcccaggcaggg

SEQ ID NO: 3316 - RNA, 19 nt, Artificial Sequence
  Description of Artificial Sequence: Synthetic oligonucleotide
gagccccugcccaggcagg

SEQ ID NO: 3317 - RNA, 19 nt, Artificial Sequence
  Description of Artificial Sequence: Synthetic oligonucleotide
ggagccccugcccaggcag

SEQ ID NO: 3318 - RNA, 19 nt, Artificial Sequence
  Description of Artificial Sequence: Synthetic oligonucleotide
uggagccccugcccaggca

SEQ ID NO: 3319 - RNA, 19 nt, Artificial Sequence
  Description of Artificial Sequence: Synthetic oligonucleotide
uuggagccccugcccaggc

SEQ ID NO: 3320 - RNA, 19 nt, Artificial Sequence
  Description of Artificial Sequence: Synthetic oligonucleotide
cuuggagccccugcccagg

SEQ ID NO: 3321 - RNA, 19 nt, Artificial Sequence
  Description of Artificial Sequence: Synthetic oligonucleotide
ccuuggagccccugcccag

SEQ ID NO: 3322 - RNA, 19 nt, Artificial Sequence
  Description of Artificial Sequence: Synthetic oligonucleotide
uccuuggagccccugccca

SEQ ID NO: 3323 - RNA, 19 nt, Artificial Sequence
  Description of Artificial Sequence: Synthetic oligonucleotide
cuccuuggagccccugccc

SEQ ID NO: 3324 - RNA, 19 nt, Artificial Sequence
  Description of Artificial Sequence: Synthetic oligonucleotide
ccuccuuggagccccugcc

SEQ ID NO: 3325 - RNA, 19 nt, Artificial Sequence
  Description of Artificial Sequence: Synthetic oligonucleotide
cccuccuuggagccccugc

SEQ ID NO: 3326 - RNA, 19 nt, Artificial Sequence
  Description of Artificial Sequence: Synthetic oligonucleotide
ccccuccuuggagccccug

SEQ ID NO: 3327 - RNA, 19 nt, Artificial Sequence
  Description of Artificial Sequence: Synthetic oligonucleotide
gccccuccuuggagccccu

SEQ ID NO: 3328 - RNA, 19 nt, Artificial Sequence
  Description of Artificial Sequence: Synthetic oligonucleotide
ggccccuccuuggagcccc

SEQ ID NO: 3329 - RNA, 19 nt, Artificial Sequence
  Description of Artificial Sequence: Synthetic oligonucleotide
uggccccuccuuggagccc

SEQ ID NO: 3330 - RNA, 19 nt, Artificial Sequence
  Description of Artificial Sequence: Synthetic oligonucleotide
auggccccuccuuggagcc

SEQ ID NO: 3331 - RNA, 19 nt, Artificial Sequence
  Description of Artificial Sequence: Synthetic oligonucleotide
gauggccccuccuuggagc

SEQ ID NO: 3332 - RNA, 19 nt, Artificial Sequence
  Description of Artificial Sequence: Synthetic oligonucleotide
agauggccccuccuuggag

SEQ ID NO: 3333 - RNA, 19 nt, Artificial Sequence
  Description of Artificial Sequence: Synthetic oligonucleotide
cagauggccccuccuugga

SEQ ID NO: 3334 - RNA, 19 nt, Artificial Sequence
  Description of Artificial Sequence: Synthetic oligonucleotide
ccagauggccccuccuugg

SEQ ID NO: 3335 - RNA, 19 nt, Artificial Sequence
  Description of Artificial Sequence: Synthetic oligonucleotide
uccagauggccccuccuug

SEQ ID NO: 3336 - RNA, 19 nt, Artificial Sequence
  Description of Artificial Sequence: Synthetic oligonucleotide
uuccagauggccccuccuu

SEQ ID NO: 3337 - RNA, 19 nt, Artificial Sequence
  Description of Artificial Sequence: Synthetic oligonucleotide
uuuccagauggccccuccu

SEQ ID NO: 3338 - RNA, 19 nt, Artificial Sequence
  Description of Artificial Sequence: Synthetic oligonucleotide
guuuccagauggccccucc

SEQ ID NO: 3339 - RNA, 19 nt, Artificial Sequence
  Description of Artificial Sequence: Synthetic oligonucleotide
aguuuccagauggccccuc

SEQ ID NO: 3340 - RNA, 19 nt, Artificial Sequence
  Description of Artificial Sequence: Synthetic oligonucleotide
aaguuuccagauggccccu

SEQ ID NO: 3341 - RNA, 19 nt, Artificial Sequence
  Description of Artificial Sequence: Synthetic oligonucleotide
caaguuuccagauggcccc

SEQ ID NO: 3342 - RNA, 19 nt, Artificial Sequence
  Description of Artificial Sequence: Synthetic oligonucleotide
acaaguuuccagauggccc

SEQ ID NO: 3343 - RNA, 19 nt, Artificial Sequence
  Description of Artificial Sequence: Synthetic oligonucleotide
cacaaguuuccagauggcc

SEQ ID NO: 3344 - RNA, 19 nt, Artificial Sequence
  Description of Artificial Sequence: Synthetic oligonucleotide
ccacaaguuuccagauggc

SEQ ID NO: 3345 - RNA, 19 nt, Artificial Sequence
  Description of Artificial Sequence: Synthetic oligonucleotide
uccacaaguuuccagaugg

SEQ ID NO: 3346 - RNA, 19 nt, Artificial Sequence
  Description of Artificial Sequence: Synthetic oligonucleotide
guccacaaguuuccagaug

SEQ ID NO: 3347 - RNA, 19 nt, Artificial Sequence
  Description of Artificial Sequence: Synthetic oligonucleotide
uguccacaaguuuccagau

SEQ ID NO: 3348 - RNA, 19 nt, Artificial Sequence
  Description of Artificial Sequence: Synthetic oligonucleotide
cuguccacaaguuuccaga

SEQ ID NO: 3349 - RNA, 19 nt, Artificial Sequence
  Description of Artificial Sequence: Synthetic oligonucleotide
ucuguccacaaguuuccag

SEQ ID NO: 3350 - RNA, 19 nt, Artificial Sequence
  Description of Artificial Sequence: Synthetic oligonucleotide
cucuguccacaaguuucca

SEQ ID NO: 3351 - RNA, 19 nt, Artificial Sequence
  Description of Artificial Sequence: Synthetic oligonucleotide
ucucuguccacaaguuucc

SEQ ID NO: 3352 - RNA, 19 nt, Artificial Sequence
  Description of Artificial Sequence: Synthetic oligonucleotide
uucucuguccacaaguuuc

SEQ ID NO: 3353 - RNA, 19 nt, Artificial Sequence
  Description of Artificial Sequence: Synthetic oligonucleotide
cuucucuguccacaaguuu

SEQ ID NO: 3354 - RNA, 19 nt, Artificial Sequence
  Description of Artificial Sequence: Synthetic oligonucleotide
ucuucucuguccacaaguu

SEQ ID NO: 3355 - RNA, 19 nt, Artificial Sequence
  Description of Artificial Sequence: Synthetic oligonucleotide
uucuucucuguccacaagu

SEQ ID NO: 3356 - RNA, 19 nt, Artificial Sequence
  Description of Artificial Sequence: Synthetic oligonucleotide
cuucuucucuguccacaag

SEQ ID NO: 3357 - RNA, 19 nt, Artificial Sequence
  Description of Artificial Sequence: Synthetic oligonucleotide
ucuucuucucuguccacaa

SEQ ID NO: 3358 - RNA, 19 nt, Artificial Sequence
  Description of Artificial Sequence: Synthetic oligonucleotide
gucuucuucucuguccaca

SEQ ID NO: 3359 - RNA, 19 nt, Artificial Sequence
  Description of Artificial Sequence: Synthetic oligonucleotide
ggucuucuucucuguccac

SEQ ID NO: 3360 - RNA, 19 nt, Artificial Sequence
  Description of Artificial Sequence: Synthetic oligonucleotide
uggucuucuucucugucca

SEQ ID NO: 3361 - RNA, 19 nt, Artificial Sequence
  Description of Artificial Sequence: Synthetic oligonucleotide
guggucuucuucucugucc

SEQ ID NO: 3362 - RNA, 19 nt, Artificial Sequence
  Description of Artificial Sequence: Synthetic oligonucleotide
cguggucuucuucucuguc

SEQ ID NO: 3363 - RNA, 19 nt, Artificial Sequence
  Description of Artificial Sequence: Synthetic oligonucleotide
ucguggucuucuucucugu

SEQ ID NO: 3364 - RNA, 19 nt, Artificial Sequence
  Description of Artificial Sequence: Synthetic oligonucleotide
gucguggucuucuucucug

SEQ ID NO: 3365 - RNA, 19 nt, Artificial Sequence
  Description of Artificial Sequence: Synthetic oligonucleotide
agucguggucuucuucucu

SEQ ID NO: 3366 - RNA, 19 nt, Artificial Sequence
  Description of Artificial Sequence: Synthetic oligonucleotide
cagucguggucuucuucuc

SEQ ID NO: 3367 - RNA, 19 nt, Artificial Sequence
  Description of Artificial Sequence: Synthetic oligonucleotide
ccagucguggucuucuucu

SEQ ID NO: 3368 - RNA, 19 nt, Artificial Sequence
  Description of Artificial Sequence: Synthetic oligonucleotide
uccagucguggucuucuuc

SEQ ID NO: 3369 - RNA, 19 nt, Artificial Sequence
  Description of Artificial Sequence: Synthetic oligonucleotide
cuccagucguggucuucuu

SEQ ID NO: 3370 - RNA, 19 nt, Artificial Sequence
  Description of Artificial Sequence: Synthetic oligonucleotide
ucuccagucguggucuucu

SEQ ID NO: 3371 - RNA, 19 nt, Artificial Sequence
  Description of Artificial Sequence: Synthetic oligonucleotide
uucuccagucguggucuuc

SEQ ID NO: 3372 - RNA, 19 nt, Artificial Sequence
  Description of Artificial Sequence: Synthetic oligonucleotide
cuucuccagucguggucuu

SEQ ID NO: 3373 - RNA, 19 nt, Artificial Sequence
  Description of Artificial Sequence: Synthetic oligonucleotide
gcuucuccagucguggucu

SEQ ID NO: 3374 - RNA, 19 nt, Artificial Sequence
  Description of Artificial Sequence: Synthetic oligonucleotide
ggcuucuccagucgugguc

SEQ ID NO: 3375 - RNA, 19 nt, Artificial Sequence
  Description of Artificial Sequence: Synthetic oligonucleotide
gggcuucuccagucguggu

SEQ ID NO: 3376 - RNA, 19 nt, Artificial Sequence
  Description of Artificial Sequence: Synthetic oligonucleotide
ggggcuucuccagucgugg

SEQ ID NO: 3377 - RNA, 19 nt, Artificial Sequence
  Description of Artificial Sequence: Synthetic oligonucleotide
gggggcuucuccagucgug

SEQ ID NO: 3378 - RNA, 19 nt, Artificial Sequence
  Description of Artificial Sequence: Synthetic oligonucleotide
agggggcuucuccagucgu

SEQ ID NO: 3379 - RNA, 19 nt, Artificial Sequence
  Description of Artificial Sequence: Synthetic oligonucleotide
aagggggcuucuccagucg

SEQ ID NO: 3380 - RNA, 19 nt, Artificial Sequence
  Description of Artificial Sequence: Synthetic oligonucleotide
aaagggggcuucuccaguc

SEQ ID NO: 3381 - RNA, 19 nt, Artificial Sequence
  Description of Artificial Sequence: Synthetic oligonucleotide
gaaagggggcuucuccagu

SEQ ID NO: 3382 - RNA, 19 nt, Artificial Sequence
  Description of Artificial Sequence: Synthetic oligonucleotide
agaaagggggcuucuccag

SEQ ID NO: 3383 - RNA, 19 nt, Artificial Sequence
  Description of Artificial Sequence: Synthetic oligonucleotide
cagaaagggggcuucucca

SEQ ID NO: 3384 - RNA, 19 nt, Artificial Sequence
  Description of Artificial Sequence: Synthetic oligonucleotide
ucagaaagggggcuucucc

SEQ ID NO: 3385 - RNA, 19 nt, Artificial Sequence
  Description of Artificial Sequence: Synthetic oligonucleotide
cucagaaagggggcuucuc

SEQ ID NO: 3386 - RNA, 19 nt, Artificial Sequence
  Description of Artificial Sequence: Synthetic oligonucleotide
acucagaaagggggcuucu

SEQ ID NO: 3387 - RNA, 19 nt, Artificial Sequence
  Description of Artificial Sequence: Synthetic oligonucleotide
cacucagaaagggggcuuc

SEQ ID NO: 3388 - RNA, 19 nt, Artificial Sequence
  Description of Artificial Sequence: Synthetic oligonucleotide
gcacucagaaagggggcuu

SEQ ID NO: 3389 - RNA, 19 nt, Artificial Sequence
  Description of Artificial Sequence: Synthetic oligonucleotide
ugcacucagaaagggggcu

SEQ ID NO: 3390 - RNA, 19 nt, Artificial Sequence
  Description of Artificial Sequence: Synthetic oligonucleotide
cugcacucagaaagggggc

SEQ ID NO: 3391 - RNA, 19 nt, Artificial Sequence
  Description of Artificial Sequence: Synthetic oligonucleotide
ccugcacucagaaaggggg

SEQ ID NO: 3392 - RNA, 19 nt, Artificial Sequence
  Description of Artificial Sequence: Synthetic oligonucleotide
cccugcacucagaaagggg

SEQ ID NO: 3393 - RNA, 19 nt, Artificial Sequence
  Description of Artificial Sequence: Synthetic oligonucleotide
ccccugcacucagaaaggg

SEQ ID NO: 3394 - RNA, 19 nt, Artificial Sequence
  Description of Artificial Sequence: Synthetic oligonucleotide
cccccugcacucagaaagg

SEQ ID NO: 3395 - RNA, 19 nt, Artificial Sequence
  Description of Artificial Sequence: Synthetic oligonucleotide
ccccccugcacucagaaag

SEQ ID NO: 3396 - RNA, 19 nt, Artificial Sequence
  Description of Artificial Sequence: Synthetic oligonucleotide
gccccccugcacucagaaa

SEQ ID NO: 3397 - RNA, 19 nt, Artificial Sequence
  Description of Artificial Sequence: Synthetic oligonucleotide
agccccccugcacucagaa

SEQ ID NO: 3398 - RNA, 19 nt, Artificial Sequence
  Description of Artificial Sequence: Synthetic oligonucleotide
cagccccccugcacucaga

SEQ ID NO: 3399 - RNA, 19 nt, Artificial Sequence
  Description of Artificial Sequence: Synthetic oligonucleotide
gcagccccccugcacucag

SEQ ID NO: 3400 - RNA, 19 nt, Artificial Sequence
  Description of Artificial Sequence: Synthetic oligonucleotide
ugcagccccccugcacuca

SEQ ID NO: 3401 - RNA, 19 nt, Artificial Sequence
  Description of Artificial Sequence: Synthetic oligonucleotide
augcagccccccugcacuc

SEQ ID NO: 3402 - RNA, 19 nt, Artificial Sequence
  Description of Artificial Sequence: Synthetic oligonucleotide
caugcagccccccugcacu

SEQ ID NO: 3403 - RNA, 19 nt, Artificial Sequence
  Description of Artificial Sequence: Synthetic oligonucleotide
gcaugcagccccccugcac

SEQ ID NO: 3404 - RNA, 19 nt, Artificial Sequence
  Description of Artificial Sequence: Synthetic oligonucleotide
cgcaugcagccccccugca

SEQ ID NO: 3405 - RNA, 19 nt, Artificial Sequence
  Description of Artificial Sequence: Synthetic oligonucleotide
acgcaugcagccccccugc

SEQ ID NO: 3406 - RNA, 19 nt, Artificial Sequence
  Description of Artificial Sequence: Synthetic oligonucleotide
aacgcaugcagccccccug

SEQ ID NO: 3407 - RNA, 19 nt, Artificial Sequence
  Description of Artificial Sequence: Synthetic oligonucleotide
caacgcaugcagccccccu

SEQ ID NO: 3408 - RNA, 19 nt, Artificial Sequence
  Description of Artificial Sequence: Synthetic oligonucleotide
gcaacgcaugcagcccccc

SEQ ID NO: 3409 - RNA, 19 nt, Artificial Sequence
  Description of Artificial Sequence: Synthetic oligonucleotide
ggcaacgcaugcagccccc

SEQ ID NO: 3410 - RNA, 19 nt, Artificial Sequence
  Description of Artificial Sequence: Synthetic oligonucleotide
aggcaacgcaugcagcccc

SEQ ID NO: 3411 - RNA, 19 nt, Artificial Sequence
  Description of Artificial Sequence: Synthetic oligonucleotide
gaggcaacgcaugcagccc

SEQ ID NO: 3412 - RNA, 19 nt, Artificial Sequence
  Description of Artificial Sequence: Synthetic oligonucleotide
ggaggcaacgcaugcagcc

SEQ ID NO: 3413 - RNA, 19 nt, Artificial Sequence
  Description of Artificial Sequence: Synthetic oligonucleotide
aggaggcaacgcaugcagc

SEQ ID NO: 3414 - RNA, 19 nt, Artificial Sequence
  Description of Artificial Sequence: Synthetic oligonucleotide
caggaggcaacgcaugcag

SEQ ID NO: 3415 - RNA, 19 nt, Artificial Sequence
  Description of Artificial Sequence: Synthetic oligonucleotide
ucaggaggcaacgcaugca

SEQ ID NO: 3416 - RNA, 19 nt, Artificial Sequence
  Description of Artificial Sequence: Synthetic oligonucleotide
cucaggaggcaacgcaugc

SEQ ID NO: 3417 - RNA, 19 nt, Artificial Sequence
  Description of Artificial Sequence: Synthetic oligonucleotide
ucucaggaggcaacgcaug

SEQ ID NO: 3418 - RNA, 19 nt, Artificial Sequence
  Description of Artificial Sequence: Synthetic oligonucleotide
aucucaggaggcaacgcau

SEQ ID NO: 3419 - RNA, 19 nt, Artificial Sequence
  Description of Artificial Sequence: Synthetic oligonucleotide
gaucucaggaggcaacgca

SEQ ID NO: 3420 - RNA, 19 nt, Artificial Sequence
  Description of Artificial Sequence: Synthetic oligonucleotide
cgaucucaggaggcaacgc

SEQ ID NO: 3421 - RNA, 19 nt, Artificial Sequence
  Description of Artificial Sequence: Synthetic oligonucleotide
ucgaucucaggaggcaacg

SEQ ID NO: 3422 - RNA, 19 nt, Artificial Sequence
  Description of Artificial Sequence: Synthetic oligonucleotide
cucgaucucaggaggcaac

SEQ ID NO: 3423 - RNA, 19 nt, Artificial Sequence
  Description of Artificial Sequence: Synthetic oligonucleotide
ccucgaucucaggaggcaa

SEQ ID NO: 3424 - RNA, 19 nt, Artificial Sequence
  Description of Artificial Sequence: Synthetic oligonucleotide
gccucgaucucaggaggca

SEQ ID NO: 3425 - RNA, 19 nt, Artificial Sequence
  Description of Artificial Sequence: Synthetic oligonucleotide
agccucgaucucaggaggc

SEQ ID NO: 3426 - RNA, 19 nt, Artificial Sequence
  Description of Artificial Sequence: Synthetic oligonucleotide
cagccucgaucucaggagg

SEQ ID NO: 3427 - RNA, 19 nt, Artificial Sequence
  Description of Artificial Sequence: Synthetic oligonucleotide
gcagccucgaucucaggag

SEQ ID NO: 3428 - RNA, 19 nt, Artificial Sequence
  Description of Artificial Sequence: Synthetic oligonucleotide
ugcagccucgaucucagga

SEQ ID NO: 3429 - RNA, 19 nt, Artificial Sequence
  Description of Artificial Sequence: Synthetic oligonucleotide
cugcagccucgaucucagg

SEQ ID NO: 3430 - RNA, 19 nt, Artificial Sequence
  Description of Artificial Sequence: Synthetic oligonucleotide
ccugcagccucgaucucag

SEQ ID NO: 3431 - RNA, 19 nt, Artificial Sequence
  Description of Artificial Sequence: Synthetic oligonucleotide
uccugcagccucgaucuca

SEQ ID NO: 3432 - RNA, 19 nt, Artificial Sequence
  Description of Artificial Sequence: Synthetic oligonucleotide
auccugcagccucgaucuc

SEQ ID NO: 3433 - RNA, 19 nt, Artificial Sequence
  Description of Artificial Sequence: Synthetic oligonucleotide
uauccugcagccucgaucu

SEQ ID NO: 3434 - RNA, 19 nt, Artificial Sequence
  Description of Artificial Sequence: Synthetic oligonucleotide
auauccugcagccucgauc

SEQ ID NO: 3435 - RNA, 19 nt, Artificial Sequence
  Description of Artificial Sequence: Synthetic oligonucleotide
cauauccugcagccucgau

SEQ ID NO: 3436 - RNA, 19 nt, Artificial Sequence
  Description of Artificial Sequence: Synthetic oligonucleotide
gcauauccugcagccucga

SEQ ID NO: 3437 - RNA, 19 nt, Artificial Sequence
  Description of Artificial Sequence: Synthetic oligonucleotide
agcauauccugcagccucg

SEQ ID NO: 3438 - RNA, 19 nt, Artificial Sequence
  Description of Artificial Sequence: Synthetic oligonucleotide
gagcauauccugcagccuc

SEQ ID NO: 3439 - RNA, 19 nt, Artificial Sequence
  Description of Artificial Sequence: Synthetic oligonucleotide
ugagcauauccugcagccu

SEQ ID NO: 3440 - RNA, 19 nt, Artificial Sequence
  Description of Artificial Sequence: Synthetic oligonucleotide
cugagcauauccugcagcc

SEQ ID NO: 3441 - RNA, 19 nt, Artificial Sequence
  Description of Artificial Sequence: Synthetic oligonucleotide
ucugagcauauccugcagc

SEQ ID NO: 3442 - RNA, 19 nt, Artificial Sequence
  Description of Artificial Sequence: Synthetic oligonucleotide
gucugagcauauccugcag

SEQ ID NO: 3443 - RNA, 19 nt, Artificial Sequence
  Description of Artificial Sequence: Synthetic oligonucleotide
agucugagcauauccugca

SEQ ID NO: 3444 - RNA, 19 nt, Artificial Sequence
  Description of Artificial Sequence: Synthetic oligonucleotide
gagucugagcauauccugc

SEQ ID NO: 3445 - RNA, 19 nt, Artificial Sequence
  Description of Artificial Sequence: Synthetic oligonucleotide
agagucugagcauauccug

SEQ ID NO: 3446 - RNA, 19 nt, Artificial Sequence
  Description of Artificial Sequence: Synthetic oligonucleotide
uagagucugagcauauccu

SEQ ID NO: 3447 - RNA, 19 nt, Artificial Sequence
  Description of Artificial Sequence: Synthetic oligonucleotide
cuagagucugagcauaucc

SEQ ID NO: 3448 - RNA, 19 nt, Artificial Sequence
  Description of Artificial Sequence: Synthetic oligonucleotide
ucuagagucugagcauauc

SEQ ID NO: 3449 - RNA, 19 nt, Artificial Sequence
  Description of Artificial Sequence: Synthetic oligonucleotide
cucuagagucugagcauau

SEQ ID NO: 3450 - RNA, 19 nt, Artificial Sequence
  Description of Artificial Sequence: Synthetic oligonucleotide
ccucuagagucugagcaua

SEQ ID NO: 3451 - RNA, 19 nt, Artificial Sequence
  Description of Artificial Sequence: Synthetic oligonucleotide
gccucuagagucugagcau

SEQ ID NO: 3452 - RNA, 19 nt, Artificial Sequence
  Description of Artificial Sequence: Synthetic oligonucleotide
cgccucuagagucugagca

SEQ ID NO: 3453 - RNA, 19 nt, Artificial Sequence
  Description of Artificial Sequence: Synthetic oligonucleotide
acgccucuagagucugagc

SEQ ID NO: 3454 - RNA, 19 nt, Artificial Sequence
  Description of Artificial Sequence: Synthetic oligonucleotide
cacgccucuagagucugag

SEQ ID NO: 3455 - RNA, 19 nt, Artificial Sequence
  Description of Artificial Sequence: Synthetic oligonucleotide
ccacgccucuagagucuga

SEQ ID NO: 3456 - RNA, 19 nt, Artificial Sequence
  Description of Artificial Sequence: Synthetic oligonucleotide
uccacgccucuagagucug

SEQ ID NO: 3457 - RNA, 19 nt, Artificial Sequence
  Description of Artificial Sequence: Synthetic oligonucleotide
guccacgccucuagagucu

SEQ ID NO: 3458 - RNA, 19 nt, Artificial Sequence
  Description of Artificial Sequence: Synthetic oligonucleotide
gguccacgccucuagaguc

SEQ ID NO: 3459 - RNA, 19 nt, Artificial Sequence
  Description of Artificial Sequence: Synthetic oligonucleotide
ugguccacgccucuagagu

SEQ ID NO: 3460 - RNA, 19 nt, Artificial Sequence
  Description of Artificial Sequence: Synthetic oligonucleotide
uugguccacgccucuagag

SEQ ID NO: 3461 - RNA, 19 nt, Artificial Sequence
  Description of Artificial Sequence: Synthetic oligonucleotide
cuugguccacgccucuaga

SEQ ID NO: 3462 - RNA, 19 nt, Artificial Sequence
  Description of Artificial Sequence: Synthetic oligonucleotide
ccuugguccacgccucuag

SEQ ID NO: 3463 - RNA, 19 nt, Artificial Sequence
  Description of Artificial Sequence: Synthetic oligonucleotide
cccuugguccacgccucua

SEQ ID NO: 3464 - RNA, 19 nt, Artificial Sequence
  Description of Artificial Sequence: Synthetic oligonucleotide
ccccuugguccacgccucu

SEQ ID NO: 3465 - RNA, 19 nt, Artificial Sequence
  Description of Artificial Sequence: Synthetic oligonucleotide
gccccuugguccacgccuc

SEQ ID NO: 3466 - RNA, 19 nt, Artificial Sequence
  Description of Artificial Sequence: Synthetic oligonucleotide
ugccccuugguccacgccu

SEQ ID NO: 3467 - RNA, 19 nt, Artificial Sequence
  Description of Artificial Sequence: Synthetic oligonucleotide
augccccuugguccacgcc

SEQ ID NO: 3468 - RNA, 19 nt, Artificial Sequence
  Description of Artificial Sequence: Synthetic oligonucleotide
caugccccuugguccacgc

SEQ ID NO: 3469 - RNA, 19 nt, Artificial Sequence
  Description of Artificial Sequence: Synthetic oligonucleotide
ccaugccccuugguccacg

SEQ ID NO: 3470 - RNA, 19 nt, Artificial Sequence
  Description of Artificial Sequence: Synthetic oligonucleotide
uccaugccccuugguccac

SEQ ID NO: 3471 - RNA, 19 nt, Artificial Sequence
  Description of Artificial Sequence: Synthetic oligonucleotide
cuccaugccccuuggucca

SEQ ID NO: 3472 - RNA, 19 nt, Artificial Sequence
  Description of Artificial Sequence: Synthetic oligonucleotide
gcuccaugccccuuggucc

SEQ ID NO: 3473 - RNA, 19 nt, Artificial Sequence
  Description of Artificial Sequence: Synthetic oligonucleotide
agcuccaugccccuugguc

SEQ ID NO: 3474 - RNA, 19 nt, Artificial Sequence
  Description of Artificial Sequence: Synthetic oligonucleotide
aagcuccaugccccuuggu

SEQ ID NO: 3475 - RNA, 19 nt, Artificial Sequence
  Description of Artificial Sequence: Synthetic oligonucleotide
gaagcuccaugccccuugg

SEQ ID NO: 3476 - RNA, 19 nt, Artificial Sequence
  Description of Artificial Sequence: Synthetic oligonucleotide
ugaagcuccaugccccuug

SEQ ID NO: 3477 - RNA, 19 nt, Artificial Sequence
  Description of Artificial Sequence: Synthetic oligonucleotide
gugaagcuccaugccccuu

SEQ ID NO: 3478 - RNA, 19 nt, Artificial Sequence
  Description of Artificial Sequence: Synthetic oligonucleotide
agugaagcuccaugccccu

SEQ ID NO: 3479 - RNA, 19 nt, Artificial Sequence
  Description of Artificial Sequence: Synthetic oligonucleotide
gagugaagcuccaugcccc

SEQ ID NO: 3480 - RNA, 19 nt, Artificial Sequence
  Description of Artificial Sequence: Synthetic oligonucleotide
ggagugaagcuccaugccc

SEQ ID NO: 3481 - RNA, 19 nt, Artificial Sequence
  Description of Artificial Sequence: Synthetic oligonucleotide
aggagugaagcuccaugcc

SEQ ID NO: 3482 - RNA, 19 nt, Artificial Sequence
  Description of Artificial Sequence: Synthetic oligonucleotide
aaggagugaagcuccaugc

SEQ ID NO: 3483 - RNA, 19 nt, Artificial Sequence
  Description of Artificial Sequence: Synthetic oligonucleotide
caaggagugaagcuccaug

SEQ ID NO: 3484 - RNA, 19 nt, Artificial Sequence
  Description of Artificial Sequence: Synthetic oligonucleotide
gcaaggagugaagcuccau

SEQ ID NO: 3485 - RNA, 19 nt, Artificial Sequence
  Description of Artificial Sequence: Synthetic oligonucleotide
agcaaggagugaagcucca

SEQ ID NO: 3486 - RNA, 19 nt, Artificial Sequence
  Description of Artificial Sequence: Synthetic oligonucleotide
cagcaaggagugaagcucc

SEQ ID NO: 3487 - RNA, 19 nt, Artificial Sequence
  Description of Artificial Sequence: Synthetic oligonucleotide
ccagcaaggagugaagcuc

SEQ ID NO: 3488 - RNA, 19 nt, Artificial Sequence
  Description of Artificial Sequence: Synthetic oligonucleotide
gccagcaaggagugaagcu

SEQ ID NO: 3489 - RNA, 19 nt, Artificial Sequence
  Description of Artificial Sequence: Synthetic oligonucleotide
ggccagcaaggagugaagc

SEQ ID NO: 3490 - RNA, 19 nt, Artificial Sequence
  Description of Artificial Sequence: Synthetic oligonucleotide
uggccagcaaggagugaag

SEQ ID NO: 3491 - RNA, 19 nt, Artificial Sequence
  Description of Artificial Sequence: Synthetic oligonucleotide
cuggccagcaaggagugaa

SEQ ID NO: 3492 - RNA, 19 nt, Artificial Sequence
  Description of Artificial Sequence: Synthetic oligonucleotide
ccuggccagcaaggaguga

SEQ ID NO: 3493 - RNA, 19 nt, Artificial Sequence
  Description of Artificial Sequence: Synthetic oligonucleotide
cccuggccagcaaggagug

SEQ ID NO: 3494 - RNA, 19 nt, Artificial Sequence
  Description of Artificial Sequence: Synthetic oligonucleotide
ucccuggccagcaaggagu

SEQ ID NO: 3495 - RNA, 19 nt, Artificial Sequence
  Description of Artificial Sequence: Synthetic oligonucleotide
cucccuggccagcaaggag

SEQ ID NO: 3496 - RNA, 19 nt, Artificial Sequence
  Description of Artificial Sequence: Synthetic oligonucleotide
acucccuggccagcaagga

SEQ ID NO: 3497 - RNA, 19 nt, Artificial Sequence
  Description of Artificial Sequence: Synthetic oligonucleotide
aacucccuggccagcaagg

SEQ ID NO: 3498 - RNA, 19 nt, Artificial Sequence
  Description of Artificial Sequence: Synthetic oligonucleotide
caacucccuggccagcaag

SEQ ID NO: 3499 - RNA, 19 nt, Artificial Sequence
  Description of Artificial Sequence: Synthetic oligonucleotide
ccaacucccuggccagcaa

SEQ ID NO: 3500 - RNA, 19 nt, Artificial Sequence
  Description of Artificial Sequence: Synthetic oligonucleotide
cccaacucccuggccagca

SEQ ID NO: 3501 - RNA, 19 nt, Artificial Sequence
  Description of Artificial Sequence: Synthetic oligonucleotide
ccccaacucccuggccagc

SEQ ID NO: 3502 - RNA, 19 nt, Artificial Sequence
  Description of Artificial Sequence: Synthetic oligonucleotide
uccccaacucccuggccag

SEQ ID NO: 3503 - RNA, 19 nt, Artificial Sequence
  Description of Artificial Sequence: Synthetic oligonucleotide
guccccaacucccuggcca

SEQ ID NO: 3504 - RNA, 19 nt, Artificial Sequence
  Description of Artificial Sequence: Synthetic oligonucleotide
aguccccaacucccuggcc

SEQ ID NO: 3505 - RNA, 19 nt, Artificial Sequence
  Description of Artificial Sequence: Synthetic oligonucleotide
gaguccccaacucccuggc

SEQ ID NO: 3506 - RNA, 19 nt, Artificial Sequence
  Description of Artificial Sequence: Synthetic oligonucleotide
ugaguccccaacucccugg

SEQ ID NO: 3507 - RNA, 19 nt, Artificial Sequence
  Description of Artificial Sequence: Synthetic oligonucleotide
cugaguccccaacucccug

SEQ ID NO: 3508 - RNA, 19 nt, Artificial Sequence
  Description of Artificial Sequence: Synthetic oligonucleotide
ucugaguccccaacucccu

SEQ ID NO: 3509 - RNA, 19 nt, Artificial Sequence
  Description of Artificial Sequence: Synthetic oligonucleotide
cucugaguccccaacuccc

SEQ ID NO: 3510 - RNA, 19 nt, Artificial Sequence
  Description of Artificial Sequence: Synthetic oligonucleotide
ccucugaguccccaacucc

SEQ ID NO: 3511 - RNA, 19 nt, Artificial Sequence
  Description of Artificial Sequence: Synthetic oligonucleotide
cccucugaguccccaacuc

SEQ ID NO: 3512 - RNA, 19 nt, Artificial Sequence
  Description of Artificial Sequence: Synthetic oligonucleotide
ucccucugaguccccaacu

SEQ ID NO: 3513 - RNA, 19 nt, Artificial Sequence
  Description of Artificial Sequence: Synthetic oligonucleotide
gucccucugaguccccaac

SEQ ID NO: 3514 - RNA, 19 nt, Artificial Sequence
  Description of Artificial Sequence: Synthetic oligonucleotide
ggucccucugaguccccaa

SEQ ID NO: 3515 - RNA, 19 nt, Artificial Sequence
  Description of Artificial Sequence: Synthetic oligonucleotide
uggucccucugagucccca

SEQ ID NO: 3516 - RNA, 19 nt, Artificial Sequence
  Description of Artificial Sequence: Synthetic oligonucleotide
guggucccucugagucccc

SEQ ID NO: 3517 - RNA, 19 nt, Artificial Sequence
  Description of Artificial Sequence: Synthetic oligonucleotide
aguggucccucugaguccc

SEQ ID NO: 3518 - RNA, 19 nt, Artificial Sequence
  Description of Artificial Sequence: Synthetic oligonucleotide
aaguggucccucugagucc

SEQ ID NO: 3519 - RNA, 19 nt, Artificial Sequence
  Description of Artificial Sequence: Synthetic oligonucleotide
caaguggucccucugaguc

SEQ ID NO: 3520 - RNA, 19 nt, Artificial Sequence
  Description of Artificial Sequence: Synthetic oligonucleotide
ccaaguggucccucugagu

SEQ ID NO: 3521 - RNA, 19 nt, Artificial Sequence
  Description of Artificial Sequence: Synthetic oligonucleotide
cccaaguggucccucugag

SEQ ID NO: 3522 - RNA, 19 nt, Artificial Sequence
  Description of Artificial Sequence: Synthetic oligonucleotide
ccccaaguggucccucuga

SEQ ID NO: 3523 - RNA, 19 nt, Artificial Sequence
  Description of Artificial Sequence: Synthetic oligonucleotide
gccccaaguggucccucug

SEQ ID NO: 3524 - RNA, 19 nt, Artificial Sequence
  Description of Artificial Sequence: Synthetic oligonucleotide
ggccccaaguggucccucu

SEQ ID NO: 3525 - RNA, 19 nt, Artificial Sequence
  Description of Artificial Sequence: Synthetic oligonucleotide
uggccccaaguggucccuc

SEQ ID NO: 3526 - RNA, 19 nt, Artificial Sequence
  Description of Artificial Sequence: Synthetic oligonucleotide
cuggccccaaguggucccu

SEQ ID NO: 3527 - RNA, 19 nt, Artificial Sequence
  Description of Artificial Sequence: Synthetic oligonucleotide
gcuggccccaagugguccc

SEQ ID NO: 3528 - RNA, 19 nt, Artificial Sequence
  Description of Artificial Sequence: Synthetic oligonucleotide
ggcuggccccaaguggucc

SEQ ID NO: 3529 - RNA, 19 nt, Artificial Sequence
  Description of Artificial Sequence: Synthetic oligonucleotide
uggcuggccccaagugguc

SEQ ID NO: 3530 - RNA, 19 nt, Artificial Sequence
  Description of Artificial Sequence: Synthetic oligonucleotide
cuggcuggccccaaguggu

SEQ ID NO: 3531 - RNA, 19 nt, Artificial Sequence
  Description of Artificial Sequence: Synthetic oligonucleotide
ucuggcuggccccaagugg

SEQ ID NO: 3532 - RNA, 19 nt, Artificial Sequence
  Description of Artificial Sequence: Synthetic oligonucleotide
gucuggcuggccccaagug

SEQ ID NO: 3533 - RNA, 19 nt, Artificial Sequence
  Description of Artificial Sequence: Synthetic oligonucleotide
agucuggcuggccccaagu

SEQ ID NO: 3534 - RNA, 19 nt, Artificial Sequence
  Description of Artificial Sequence: Synthetic oligonucleotide
cagucuggcuggccccaag

SEQ ID NO: 3535 - RNA, 19 nt, Artificial Sequence
  Description of Artificial Sequence: Synthetic oligonucleotide
ccagucuggcuggccccaa

SEQ ID NO: 3536 - RNA, 19 nt, Artificial Sequence
  Description of Artificial Sequence: Synthetic oligonucleotide
gccagucuggcuggcccca

SEQ ID NO: 3537 - RNA, 19 nt, Artificial Sequence
  Description of Artificial Sequence: Synthetic oligonucleotide
ggccagucuggcuggcccc

SEQ ID NO: 3538 - RNA, 19 nt, Artificial Sequence
  Description of Artificial Sequence: Synthetic oligonucleotide
aggccagucuggcuggccc

SEQ ID NO: 3539 - RNA, 19 nt, Artificial Sequence
  Description of Artificial Sequence: Synthetic oligonucleotide
gaggccagucuggcuggcc

SEQ ID NO: 3540 - RNA, 19 nt, Artificial Sequence
  Description of Artificial Sequence: Synthetic oligonucleotide
ugaggccagucuggcuggc

SEQ ID NO: 3541 - RNA, 19 nt, Artificial Sequence
  Description of Artificial Sequence: Synthetic oligonucleotide
uugaggccagucuggcugg

SEQ ID NO: 3542 - RNA, 19 nt, Artificial Sequence
  Description of Artificial Sequence: Synthetic oligonucleotide
auugaggccagucuggcug

SEQ ID NO: 3543 - RNA, 19 nt, Artificial Sequence
  Description of Artificial Sequence: Synthetic oligonucleotide
cauugaggccagucuggcu

SEQ ID NO: 3544 - RNA, 19 nt, Artificial Sequence
  Description of Artificial Sequence: Synthetic oligonucleotide
ccauugaggccagucuggc

SEQ ID NO: 3545 - RNA, 19 nt, Artificial Sequence
  Description of Artificial Sequence: Synthetic oligonucleotide
gccauugaggccagucugg

SEQ ID NO: 3546 - RNA, 19 nt, Artificial Sequence
  Description of Artificial Sequence: Synthetic oligonucleotide
cgccauugaggccagucug

SEQ ID NO: 3547 - RNA, 19 nt, Artificial Sequence
  Description of Artificial Sequence: Synthetic oligonucleotide
ccgccauugaggccagucu

SEQ ID NO: 3548 - RNA, 19 nt, Artificial Sequence
  Description of Artificial Sequence: Synthetic oligonucleotide
uccgccauugaggccaguc

SEQ ID NO: 3549 - RNA, 19 nt, Artificial Sequence
  Description of Artificial Sequence: Synthetic oligonucleotide
guccgccauugaggccagu

SEQ ID NO: 3550 - RNA, 19 nt, Artificial Sequence
  Description of Artificial Sequence: Synthetic oligonucleotide
aguccgccauugaggccag

SEQ ID NO: 3551 - RNA, 19 nt, Artificial Sequence
  Description of Artificial Sequence: Synthetic oligonucleotide
gaguccgccauugaggcca

SEQ ID NO: 3552 - RNA, 19 nt, Artificial Sequence
  Description of Artificial Sequence: Synthetic oligonucleotide
ugaguccgccauugaggcc

SEQ ID NO: 3553 - RNA, 19 nt, Artificial Sequence
  Description of Artificial Sequence: Synthetic oligonucleotide
cugaguccgccauugaggc

SEQ ID NO: 3554 - RNA, 19 nt, Artificial Sequence
  Description of Artificial Sequence: Synthetic oligonucleotide
acugaguccgccauugagg

SEQ ID NO: 3555 - RNA, 19 nt, Artificial Sequence
  Description of Artificial Sequence: Synthetic oligonucleotide
gacugaguccgccauugag

SEQ ID NO: 3556 - RNA, 19 nt, Artificial Sequence
  Description of Artificial Sequence: Synthetic oligonucleotide
ugacugaguccgccauuga

SEQ ID NO: 3557 - RNA, 19 nt, Artificial Sequence
  Description of Artificial Sequence: Synthetic oligonucleotide
gugacugaguccgccauug

SEQ ID NO: 3558 - RNA, 19 nt, Artificial Sequence
  Description of Artificial Sequence: Synthetic oligonucleotide
ugugacugaguccgccauu

SEQ ID NO: 3559 - RNA, 19 nt, Artificial Sequence
  Description of Artificial Sequence: Synthetic oligonucleotide
augugacugaguccgccau

SEQ ID NO: 3560 - RNA, 19 nt, Artificial Sequence
  Description of Artificial Sequence: Synthetic oligonucleotide
aaugugacugaguccgcca

SEQ ID NO: 3561 - RNA, 19 nt, Artificial Sequence
  Description of Artificial Sequence: Synthetic oligonucleotide
caaugugacugaguccgcc

SEQ ID NO: 3562 - RNA, 19 nt, Artificial Sequence
  Description of Artificial Sequence: Synthetic oligonucleotide
ucaaugugacugaguccgc

SEQ ID NO: 3563 - RNA, 19 nt, Artificial Sequence
  Description of Artificial Sequence: Synthetic oligonucleotide
gucaaugugacugaguccg

SEQ ID NO: 3564 - RNA, 19 nt, Artificial Sequence
  Description of Artificial Sequence: Synthetic oligonucleotide
agucaaugugacugagucc

SEQ ID NO: 3565 - RNA, 19 nt, Artificial Sequence
  Description of Artificial Sequence: Synthetic oligonucleotide
cagucaaugugacugaguc

SEQ ID NO: 3566 - RNA, 19 nt, Artificial Sequence
  Description of Artificial Sequence: Synthetic oligonucleotide
ucagucaaugugacugagu

SEQ ID NO: 3567 - RNA, 19 nt, Artificial Sequence
  Description of Artificial Sequence: Synthetic oligonucleotide
gucagucaaugugacugag

SEQ ID NO: 3568 - RNA, 19 nt, Artificial Sequence
  Description of Artificial Sequence: Synthetic oligonucleotide
cgucagucaaugugacuga

SEQ ID NO: 3569 - RNA, 19 nt, Artificial Sequence
  Description of Artificial Sequence: Synthetic oligonucleotide
ccgucagucaaugugacug

SEQ ID NO: 3570 - RNA, 19 nt, Artificial Sequence
  Description of Artificial Sequence: Synthetic oligonucleotide
cccgucagucaaugugacu

SEQ ID NO: 3571 - RNA, 19 nt, Artificial Sequence
  Description of Artificial Sequence: Synthetic oligonucleotide
ccccgucagucaaugugac

SEQ ID NO: 3572 - RNA, 19 nt, Artificial Sequence
  Description of Artificial Sequence: Synthetic oligonucleotide
uccccgucagucaauguga

SEQ ID NO: 3573 - RNA, 19 nt, Artificial Sequence
  Description of Artificial Sequence: Synthetic oligonucleotide
guccccgucagucaaugug

SEQ ID NO: 3574 - RNA, 19 nt, Artificial Sequence
  Description of Artificial Sequence: Synthetic oligonucleotide
gguccccgucagucaaugu

SEQ ID NO: 3575 - RNA, 19 nt, Artificial Sequence
  Description of Artificial Sequence: Synthetic oligonucleotide
ugguccccgucagucaaug

SEQ ID NO: 3576 - RNA, 19 nt, Artificial Sequence
  Description of Artificial Sequence: Synthetic oligonucleotide
cugguccccgucagucaau

SEQ ID NO: 3577 - RNA, 19 nt, Artificial Sequence
  Description of Artificial Sequence: Synthetic oligonucleotide
ccugguccccgucagucaa

SEQ ID NO: 3578 - RNA, 19 nt, Artificial Sequence
  Description of Artificial Sequence: Synthetic oligonucleotide
cccugguccccgucaguca

SEQ ID NO: 3579 - RNA, 19 nt, Artificial Sequence
  Description of Artificial Sequence: Synthetic oligonucleotide
gcccugguccccgucaguc

SEQ ID NO: 3580 - RNA, 19 nt, Artificial Sequence
  Description of Artificial Sequence: Synthetic oligonucleotide
agcccugguccccgucagu

SEQ ID NO: 3581 - RNA, 19 nt, Artificial Sequence
  Description of Artificial Sequence: Synthetic oligonucleotide
aagcccugguccccgucag

SEQ ID NO: 3582 - RNA, 19 nt, Artificial Sequence
  Description of Artificial Sequence: Synthetic oligonucleotide
caagcccugguccccguca

SEQ ID NO: 3583 - RNA, 19 nt, Artificial Sequence
  Description of Artificial Sequence: Synthetic oligonucleotide
acaagcccugguccccguc

SEQ ID NO: 3584 - RNA, 19 nt, Artificial Sequence
  Description of Artificial Sequence: Synthetic oligonucleotide
cacaagcccugguccccgu

SEQ ID NO: 3585 - RNA, 19 nt, Artificial Sequence
  Description of Artificial Sequence: Synthetic oligonucleotide
acacaagcccugguccccg

SEQ ID NO: 3586 - RNA, 19 nt, Artificial Sequence
  Description of Artificial Sequence: Synthetic oligonucleotide
cacacaagcccuggucccc

SEQ ID NO: 3587 - RNA, 19 nt, Artificial Sequence
  Description of Artificial Sequence: Synthetic oligonucleotide
ccacacaagcccugguccc

SEQ ID NO: 3588 - RNA, 19 nt, Artificial Sequence
  Description of Artificial Sequence: Synthetic oligonucleotide
cccacacaagcccuggucc

SEQ ID NO: 3589 - RNA, 19 nt, Artificial Sequence
  Description of Artificial Sequence: Synthetic oligonucleotide
acccacacaagcccugguc

SEQ ID NO: 3590 - RNA, 19 nt, Artificial Sequence
  Description of Artificial Sequence: Synthetic oligonucleotide
gacccacacaagcccuggu

SEQ ID NO: 3591 - RNA, 19 nt, Artificial Sequence
  Description of Artificial Sequence: Synthetic oligonucleotide
cgacccacacaagcccugg

SEQ ID NO: 3592 - RNA, 19 nt, Artificial Sequence
  Description of Artificial Sequence: Synthetic oligonucleotide
ucgacccacacaagcccug

SEQ ID NO: 3593 - RNA, 19 nt, Artificial Sequence
  Description of Artificial Sequence: Synthetic oligonucleotide
cucgacccacacaagcccu

SEQ ID NO: 3594 - RNA, 19 nt, Artificial Sequence
  Description of Artificial Sequence: Synthetic oligonucleotide
ucucgacccacacaagccc

SEQ ID NO: 3595 - RNA, 19 nt, Artificial Sequence
  Description of Artificial Sequence: Synthetic oligonucleotide
cucucgacccacacaagcc

SEQ ID NO: 3596 - RNA, 19 nt, Artificial Sequence
  Description of Artificial Sequence: Synthetic oligonucleotide
gcucucgacccacacaagc

SEQ ID NO: 3597 - RNA, 19 nt, Artificial Sequence
  Description of Artificial Sequence: Synthetic oligonucleotide
cgcucucgacccacacaag

SEQ ID NO: 3598 - RNA, 19 nt, Artificial Sequence
  Description of Artificial Sequence: Synthetic oligonucleotide
gcgcucucgacccacacaa

SEQ ID NO: 3599 - RNA, 19 nt, Artificial Sequence
  Description of Artificial Sequence: Synthetic oligonucleotide
ggcgcucucgacccacaca

SEQ ID NO: 3600 - RNA, 19 nt, Artificial Sequence
  Description of Artificial Sequence: Synthetic oligonucleotide
gggcgcucucgacccacac

SEQ ID NO: 3601 - RNA, 19 nt, Artificial Sequence
  Description of Artificial Sequence: Synthetic oligonucleotide
agggcgcucucgacccaca

SEQ ID NO: 3602 - RNA, 19 nt, Artificial Sequence
  Description of Artificial Sequence: Synthetic oligonucleotide
gagggcgcucucgacccac

SEQ ID NO: 3603 - RNA, 19 nt, Artificial Sequence
  Description of Artificial Sequence: Synthetic oligonucleotide
ugagggcgcucucgaccca

SEQ ID NO: 3604 - RNA, 19 nt, Artificial Sequence
  Description of Artificial Sequence: Synthetic oligonucleotide
augagggcgcucucgaccc

SEQ ID NO: 3605 - RNA, 19 nt, Artificial Sequence
  Description of Artificial Sequence: Synthetic oligonucleotide
caugagggcgcucucgacc

SEQ ID NO: 3606 - RNA, 19 nt, Artificial Sequence
  Description of Artificial Sequence: Synthetic oligonucleotide
ccaugagggcgcucucgac

SEQ ID NO: 3607 - RNA, 19 nt, Artificial Sequence
  Description of Artificial Sequence: Synthetic oligonucleotide
accaugagggcgcucucga

SEQ ID NO: 3608 - RNA, 19 nt, Artificial Sequence
  Description of Artificial Sequence: Synthetic oligonucleotide
caccaugagggcgcucucg

SEQ ID NO: 3609 - RNA, 19 nt, Artificial Sequence
  Description of Artificial Sequence: Synthetic oligonucleotide
gcaccaugagggcgcucuc

SEQ ID NO: 3610 - RNA, 19 nt, Artificial Sequence
  Description of Artificial Sequence: Synthetic oligonucleotide
agcaccaugagggcgcucu

SEQ ID NO: 3611 - RNA, 19 nt, Artificial Sequence
  Description of Artificial Sequence: Synthetic oligonucleotide
cagcaccaugagggcgcuc

SEQ ID NO: 3612 - RNA, 19 nt, Artificial Sequence
  Description of Artificial Sequence: Synthetic oligonucleotide
ccagcaccaugagggcgcu

SEQ ID NO: 3613 - RNA, 19 nt, Artificial Sequence
  Description of Artificial Sequence: Synthetic oligonucleotide
accagcaccaugagggcgc

SEQ ID NO: 3614 - RNA, 19 nt, Artificial Sequence
  Description of Artificial Sequence: Synthetic oligonucleotide
caccagcaccaugagggcg

SEQ ID NO: 3615 - RNA, 19 nt, Artificial Sequence
  Description of Artificial Sequence: Synthetic oligonucleotide
gcaccagcaccaugagggc

SEQ ID NO: 3616 - RNA, 19 nt, Artificial Sequence
  Description of Artificial Sequence: Synthetic oligonucleotide
agcaccagcaccaugaggg

SEQ ID NO: 3617 - RNA, 19 nt, Artificial Sequence
  Description of Artificial Sequence: Synthetic oligonucleotide
cagcaccagcaccaugagg

SEQ ID NO: 3618 - RNA, 19 nt, Artificial Sequence
  Description of Artificial Sequence: Synthetic oligonucleotide
acagcaccagcaccaugag

SEQ ID NO: 3619 - RNA, 19 nt, Artificial Sequence
  Description of Artificial Sequence: Synthetic oligonucleotide
aacagcaccagcaccauga

SEQ ID NO: 3620 - RNA, 19 nt, Artificial Sequence
  Description of Artificial Sequence: Synthetic oligonucleotide
caacagcaccagcaccaug

SEQ ID NO: 3621 - RNA, 19 nt, Artificial Sequence
  Description of Artificial Sequence: Synthetic oligonucleotide
acaacagcaccagcaccau

SEQ ID NO: 3622 - RNA, 19 nt, Artificial Sequence
  Description of Artificial Sequence: Synthetic oligonucleotide
cacaacagcaccagcacca

SEQ ID NO: 3623 - RNA, 19 nt, Artificial Sequence
  Description of Artificial Sequence: Synthetic oligonucleotide
acacaacagcaccagcacc

SEQ ID NO: 3624 - RNA, 19 nt, Artificial Sequence
  Description of Artificial Sequence: Synthetic oligonucleotide
cacacaacagcaccagcac

SEQ ID NO: 3625 - RNA, 19 nt, Artificial Sequence
  Description of Artificial Sequence: Synthetic oligonucleotide
acacacaacagcaccagca

SEQ ID NO: 3626 - RNA, 19 nt, Artificial Sequence
  Description of Artificial Sequence: Synthetic oligonucleotide
uacacacaacagcaccagc

SEQ ID NO: 3627 - RNA, 19 nt, Artificial Sequence
  Description of Artificial Sequence: Synthetic oligonucleotide
cuacacacaacagcaccag

SEQ ID NO: 3628 - RNA, 19 nt, Artificial Sequence
  Description of Artificial Sequence: Synthetic oligonucleotide
ccuacacacaacagcacca

SEQ ID NO: 3629 - RNA, 19 nt, Artificial Sequence
  Description of Artificial Sequence: Synthetic oligonucleotide
accuacacacaacagcacc

SEQ ID NO: 3630 - RNA, 19 nt, Artificial Sequence
  Description of Artificial Sequence: Synthetic oligonucleotide
gaccuacacacaacagcac

SEQ ID NO: 3631 - RNA, 19 nt, Artificial Sequence
  Description of Artificial Sequence: Synthetic oligonucleotide
ggaccuacacacaacagca

SEQ ID NO: 3632 - RNA, 19 nt, Artificial Sequence
  Description of Artificial Sequence: Synthetic oligonucleotide
gggaccuacacacaacagc

SEQ ID NO: 3633 - RNA, 19 nt, Artificial Sequence
  Description of Artificial Sequence: Synthetic oligonucleotide
ggggaccuacacacaacag

SEQ ID NO: 3634 - RNA, 19 nt, Artificial Sequence
  Description of Artificial Sequence: Synthetic oligonucleotide
aggggaccuacacacaaca

SEQ ID NO: 3635 - RNA, 19 nt, Artificial Sequence
  Description of Artificial Sequence: Synthetic oligonucleotide
caggggaccuacacacaac

SEQ ID NO: 3636 - RNA, 19 nt, Artificial Sequence
  Description of Artificial Sequence: Synthetic oligonucleotide
ccaggggaccuacacacaa

SEQ ID NO: 3637 - RNA, 19 nt, Artificial Sequence
  Description of Artificial Sequence: Synthetic oligonucleotide
cccaggggaccuacacaca

SEQ ID NO: 3638 - RNA, 19 nt, Artificial Sequence
  Description of Artificial Sequence: Synthetic oligonucleotide
ccccaggggaccuacacac

SEQ ID NO: 3639 - RNA, 19 nt, Artificial Sequence
  Description of Artificial Sequence: Synthetic oligonucleotide
uccccaggggaccuacaca

SEQ ID NO: 3640 - RNA, 19 nt, Artificial Sequence
  Description of Artificial Sequence: Synthetic oligonucleotide
guccccaggggaccuacac

SEQ ID NO: 3641 - RNA, 19 nt, Artificial Sequence
  Description of Artificial Sequence: Synthetic oligonucleotide
uguccccaggggaccuaca

SEQ ID NO: 3642 - RNA, 19 nt, Artificial Sequence
  Description of Artificial Sequence: Synthetic oligonucleotide
guguccccaggggaccuac

SEQ ID NO: 3643 - RNA, 19 nt, Artificial Sequence
  Description of Artificial Sequence: Synthetic oligonucleotide
uguguccccaggggaccua

SEQ ID NO: 3644 - RNA, 19 nt, Artificial Sequence
  Description of Artificial Sequence: Synthetic oligonucleotide
uuguguccccaggggaccu

SEQ ID NO: 3645 - RNA, 19 nt, Artificial Sequence
  Description of Artificial Sequence: Synthetic oligonucleotide
cuuguguccccaggggacc

SEQ ID NO: 3646 - RNA, 19 nt, Artificial Sequence
  Description of Artificial Sequence: Synthetic oligonucleotide
gcuuguguccccaggggac

SEQ ID NO: 3647 - RNA, 19 nt, Artificial Sequence
  Description of Artificial Sequence: Synthetic oligonucleotide
ugcuuguguccccagggga

SEQ ID NO: 3648 - RNA, 19 nt, Artificial Sequence
  Description of Artificial Sequence: Synthetic oligonucleotide
cugcuuguguccccagggg

SEQ ID NO: 3649 - RNA, 19 nt, Artificial Sequence
  Description of Artificial Sequence: Synthetic oligonucleotide
ccugcuuguguccccaggg

SEQ ID NO: 3650 - RNA, 19 nt, Artificial Sequence
  Description of Artificial Sequence: Synthetic oligonucleotide
gccugcuuguguccccagg

SEQ ID NO: 3651 - RNA, 19 nt, Artificial Sequence
  Description of Artificial Sequence: Synthetic oligonucleotide
cgccugcuuguguccccag

SEQ ID NO: 3652 - RNA, 19 nt, Artificial Sequence
  Description of Artificial Sequence: Synthetic oligonucleotide
gcgccugcuugugucccca

SEQ ID NO: 3653 - RNA, 19 nt, Artificial Sequence
  Description of Artificial Sequence: Synthetic oligonucleotide
ggcgccugcuugugucccc

SEQ ID NO: 3654 - RNA, 19 nt, Artificial Sequence
  Description of Artificial Sequence: Synthetic oligonucleotide
uggcgccugcuuguguccc

SEQ ID NO: 3655 - RNA, 19 nt, Artificial Sequence
  Description of Artificial Sequence: Synthetic oligonucleotide
uuggcgccugcuugugucc

SEQ ID NO: 3656 - RNA, 19 nt, Artificial Sequence
  Description of Artificial Sequence: Synthetic oligonucleotide
auuggcgccugcuuguguc

SEQ ID NO: 3657 - RNA, 19 nt, Artificial Sequence
  Description of Artificial Sequence: Synthetic oligonucleotide
cauuggcgccugcuugugu

SEQ ID NO: 3658 - RNA, 19 nt, Artificial Sequence
  Description of Artificial Sequence: Synthetic oligonucleotide
ccauuggcgccugcuugug

SEQ ID NO: 3659 - RNA, 19 nt, Artificial Sequence
  Description of Artificial Sequence: Synthetic oligonucleotide
accauuggcgccugcuugu

SEQ ID NO: 3660 - RNA, 19 nt, Artificial Sequence
  Description of Artificial Sequence: Synthetic oligonucleotide
uaccauuggcgccugcuug

SEQ ID NO: 3661 - RNA, 19 nt, Artificial Sequence
  Description of Artificial Sequence: Synthetic oligonucleotide
auaccauuggcgccugcuu

SEQ ID NO: 3662 - RNA, 19 nt, Artificial Sequence
  Description of Artificial Sequence: Synthetic oligonucleotide
gauaccauuggcgccugcu

SEQ ID NO: 3663 - RNA, 19 nt, Artificial Sequence
  Description of Artificial Sequence: Synthetic oligonucleotide
agauaccauuggcgccugc

SEQ ID NO: 3664 - RNA, 19 nt, Artificial Sequence
  Description of Artificial Sequence: Synthetic oligonucleotide
cagauaccauuggcgccug

SEQ ID NO: 3665 - RNA, 19 nt, Artificial Sequence
  Description of Artificial Sequence: Synthetic oligonucleotide
ccagauaccauuggcgccu

SEQ ID NO: 3666 - RNA, 19 nt, Artificial Sequence
  Description of Artificial Sequence: Synthetic oligonucleotide
cccagauaccauuggcgcc

SEQ ID NO: 3667 - RNA, 19 nt, Artificial Sequence
  Description of Artificial Sequence: Synthetic oligonucleotide
gcccagauaccauuggcgc

SEQ ID NO: 3668 - RNA, 19 nt, Artificial Sequence
  Description of Artificial Sequence: Synthetic oligonucleotide
cgcccagauaccauuggcg

SEQ ID NO: 3669 - RNA, 19 nt, Artificial Sequence
  Description of Artificial Sequence: Synthetic oligonucleotide
ccgcccagauaccauuggc

SEQ ID NO: 3670 - RNA, 19 nt, Artificial Sequence
  Description of Artificial Sequence: Synthetic oligonucleotide
uccgcccagauaccauugg

SEQ ID NO: 3671 - RNA, 19 nt, Artificial Sequence
  Description of Artificial Sequence: Synthetic oligonucleotide
cuccgcccagauaccauug

SEQ ID NO: 3672 - RNA, 19 nt, Artificial Sequence
  Description of Artificial Sequence: Synthetic oligonucleotide
gcuccgcccagauaccauu

SEQ ID NO: 3673 - RNA, 19 nt, Artificial Sequence
  Description of Artificial Sequence: Synthetic oligonucleotide
agcuccgcccagauaccau

SEQ ID NO: 3674 - RNA, 19 nt, Artificial Sequence
  Description of Artificial Sequence: Synthetic oligonucleotide
gagcuccgcccagauacca

SEQ ID NO: 3675 - RNA, 19 nt, Artificial Sequence
  Description of Artificial Sequence: Synthetic oligonucleotide
ugagcuccgcccagauacc

SEQ ID NO: 3676 - RNA, 19 nt, Artificial Sequence
  Description of Artificial Sequence: Synthetic oligonucleotide
gugagcuccgcccagauac

SEQ ID NO: 3677 - RNA, 19 nt, Artificial Sequence
  Description of Artificial Sequence: Synthetic oligonucleotide
ugugagcuccgcccagaua

SEQ ID NO: 3678 - RNA, 19 nt, Artificial Sequence
  Description of Artificial Sequence: Synthetic oligonucleotide
cugugagcuccgcccagau

SEQ ID NO: 3679 - RNA, 19 nt, Artificial Sequence
  Description of Artificial Sequence: Synthetic oligonucleotide
ucugugagcuccgcccaga

SEQ ID NO: 3680 - RNA, 19 nt, Artificial Sequence
  Description of Artificial Sequence: Synthetic oligonucleotide
cucugugagcuccgcccag

SEQ ID NO: 3681 - RNA, 19 nt, Artificial Sequence
  Description of Artificial Sequence: Synthetic oligonucleotide
acucugugagcuccgccca

SEQ ID NO: 3682 - RNA, 19 nt, Artificial Sequence
  Description of Artificial Sequence: Synthetic oligonucleotide
aacucugugagcuccgccc

SEQ ID NO: 3683 - RNA, 19 nt, Artificial Sequence
  Description of Artificial Sequence: Synthetic oligonucleotide
gaacucugugagcuccgcc

SEQ ID NO: 3684 - RNA, 19 nt, Artificial Sequence
  Description of Artificial Sequence: Synthetic oligonucleotide
agaacucugugagcuccgc

SEQ ID NO: 3685 - RNA, 19 nt, Artificial Sequence
  Description of Artificial Sequence: Synthetic oligonucleotide
aagaacucugugagcuccg

SEQ ID NO: 3686 - RNA, 19 nt, Artificial Sequence
  Description of Artificial Sequence: Synthetic oligonucleotide
caagaacucugugagcucc

SEQ ID NO: 3687 - RNA, 19 nt, Artificial Sequence
  Description of Artificial Sequence: Synthetic oligonucleotide
ccaagaacucugugagcuc

SEQ ID NO: 3688 - RNA, 19 nt, Artificial Sequence
  Description of Artificial Sequence: Synthetic oligonucleotide
uccaagaacucugugagcu

SEQ ID NO: 3689 - RNA, 19 nt, Artificial Sequence
  Description of Artificial Sequence: Synthetic oligonucleotide
uuccaagaacucugugagc

SEQ ID NO: 3690 - RNA, 19 nt, Artificial Sequence
  Description of Artificial Sequence: Synthetic oligonucleotide
auuccaagaacucugugag

SEQ ID NO: 3691 - RNA, 19 nt, Artificial Sequence
  Description of Artificial Sequence: Synthetic oligonucleotide
uauuccaagaacucuguga

SEQ ID NO: 3692 - RNA, 19 nt, Artificial Sequence
  Description of Artificial Sequence: Synthetic oligonucleotide
uuauuccaagaacucugug

SEQ ID NO: 3693 - RNA, 19 nt, Artificial Sequence
  Description of Artificial Sequence: Synthetic oligonucleotide
uuuauuccaagaacucugu

SEQ ID NO: 3694 - RNA, 19 nt, Artificial Sequence
  Description of Artificial Sequence: Synthetic oligonucleotide
uuuuauuccaagaacucug

SEQ ID NO: 3695 - RNA, 19 nt, Artificial Sequence
  Description of Artificial Sequence: Synthetic oligonucleotide
cuuuuauuccaagaacucu

SEQ ID NO: 3696 - RNA, 19 nt, Artificial Sequence
  Description of Artificial Sequence: Synthetic oligonucleotide
gcuuuuauuccaagaacuc

SEQ ID NO: 3697 - RNA, 19 nt, Artificial Sequence
  Description of Artificial Sequence: Synthetic oligonucleotide
ugcuuuuauuccaagaacu

SEQ ID NO: 3698 - RNA, 19 nt, Artificial Sequence
  Description of Artificial Sequence: Synthetic oligonucleotide
uugcuuuuauuccaagaac

SEQ ID NO: 3699 - RNA, 19 nt, Artificial Sequence
  Description of Artificial Sequence: Synthetic oligonucleotide
guugcuuuuauuccaagaa

SEQ ID NO: 3700 - RNA, 19 nt, Artificial Sequence
  Description of Artificial Sequence: Synthetic oligonucleotide
gguugcuuuuauuccaaga

SEQ ID NO: 3701 - RNA, 19 nt, Artificial Sequence
  Description of Artificial Sequence: Synthetic oligonucleotide
agguugcuuuuauuccaag

SEQ ID NO: 3702 - RNA, 19 nt, Artificial Sequence
  Description of Artificial Sequence: Synthetic oligonucleotide
gagguugcuuuuauuccaa

SEQ ID NO: 3703 - RNA, 19 nt, Artificial Sequence
  Description of Artificial Sequence: Synthetic oligonucleotide
ugagguugcuuuuauucca

SEQ ID NO: 3704 - RNA, 19 nt, Artificial Sequence
  Description of Artificial Sequence: Synthetic oligonucleotide
cugagguugcuuuuauucc

SEQ ID NO: 3705 - RNA, 19 nt, Artificial Sequence
  Description of Artificial Sequence: Synthetic oligonucleotide
ucugagguugcuuuuauuc

SEQ ID NO: 3706 - RNA, 19 nt, Artificial Sequence
  Description of Artificial Sequence: Synthetic oligonucleotide
uucugagguugcuuuuauu

SEQ ID NO: 3707 - RNA, 19 nt, Artificial Sequence
  Description of Artificial Sequence: Synthetic oligonucleotide
guucugagguugcuuuuau

SEQ ID NO: 3708 - RNA, 19 nt, Artificial Sequence
  Description of Artificial Sequence: Synthetic oligonucleotide
uguucugagguugcuuuua

SEQ ID NO: 3709 - DNA, 20 bp, Artificial Sequence
  Description of Artificial Sequence: Synthetic oligonucleotide
aagtgttctgaggttgcttt

SEQ ID NO: 3710 - DNA, 20 bp, Artificial Sequence
  Description of Artificial Sequence: Synthetic oligonucleotide
agtgttctgaggttgctttt

SEQ ID NO: 3711 - DNA, 20 bp, Artificial Sequence
  Description of Artificial Sequence: Synthetic oligonucleotide
gtgttctgaggttgctttta

SEQ ID NO: 3712 - DNA, 20 bp, Artificial Sequence
  Description of Artificial Sequence: Synthetic oligonucleotide
tgttctgaggttgcttttat

SEQ ID NO: 3713 - DNA, 20 bp, Artificial Sequence
  Description of Artificial Sequence: Synthetic oligonucleotide
gttctgaggttgcttttatt

SEQ ID NO: 3714 - DNA, 20 bp, Artificial Sequence
  Description of Artificial Sequence: Synthetic oligonucleotide
ttctgaggttgcttttattc

SEQ ID NO: 3715 - DNA, 20 bp, Artificial Sequence
  Description of Artificial Sequence: Synthetic oligonucleotide
tctgaggttgcttttattcc

SEQ ID NO: 3716 - DNA, 20 bp, Artificial Sequence
  Description of Artificial Sequence: Synthetic oligonucleotide
ctgaggttgcttttattcca

SEQ ID NO: 3717 - DNA, 20 bp, Artificial Sequence
  Description of Artificial Sequence: Synthetic oligonucleotide
tgaggttgcttttattccaa

SEQ ID NO: 3718 - DNA, 20 bp, Artificial Sequence
  Description of Artificial Sequence: Synthetic oligonucleotide
gaggttgcttttattccaag

SEQ ID NO: 3719 - DNA, 20 bp, Artificial Sequence
  Description of Artificial Sequence: Synthetic oligonucleotide
aggttgcttttattccaaga

SEQ ID NO: 3720 - DNA, 20 bp, Artificial Sequence
  Description of Artificial Sequence: Synthetic oligonucleotide
ggttgcttttattccaagaa

SEQ ID NO: 3721 - DNA, 20 bp, Artificial Sequence
  Description of Artificial Sequence: Synthetic oligonucleotide
gttgcttttattccaagaac

SEQ ID NO: 3722 - DNA, 20 bp, Artificial Sequence
  Description of Artificial Sequence: Synthetic oligonucleotide
ttgcttttattccaagaact

SEQ ID NO: 3723 - DNA, 20 bp, Artificial Sequence
  Description of Artificial Sequence: Synthetic oligonucleotide
tgcttttattccaagaactc

SEQ ID NO: 3724 - DNA, 20 bp, Artificial Sequence
  Description of Artificial Sequence: Synthetic oligonucleotide
gcttttattccaagaactct

SEQ ID NO: 3725 - DNA, 20 bp, Artificial Sequence
  Description of Artificial Sequence: Synthetic oligonucleotide
cttttattccaagaactctg

SEQ ID NO: 3726 - DNA, 20 bp, Artificial Sequence
  Description of Artificial Sequence: Synthetic oligonucleotide
ttttattccaagaactctgt

SEQ ID NO: 3727 - DNA, 20 bp, Artificial Sequence
  Description of Artificial Sequence: Synthetic oligonucleotide
tttattccaagaactctgtg

SEQ ID NO: 3728 - DNA, 20 bp, Artificial Sequence
  Description of Artificial Sequence: Synthetic oligonucleotide
ttattccaagaactctgtga

SEQ ID NO: 3729 - DNA, 20 bp, Artificial Sequence
  Description of Artificial Sequence: Synthetic oligonucleotide
tattccaagaactctgtgag

SEQ ID NO: 3730 - DNA, 20 bp, Artificial Sequence
  Description of Artificial Sequence: Synthetic oligonucleotide
attccaagaactctgtgagc

SEQ ID NO: 3731 - DNA, 20 bp, Artificial Sequence
  Description of Artificial Sequence: Synthetic oligonucleotide
ttccaagaactctgtgagct

SEQ ID NO: 3732 - DNA, 20 bp, Artificial Sequence
  Description of Artificial Sequence: Synthetic oligonucleotide
tccaagaactctgtgagctc

SEQ ID NO: 3733 - DNA, 20 bp, Artificial Sequence
  Description of Artificial Sequence: Synthetic oligonucleotide
ccaagaactctgtgagctcc

SEQ ID NO: 3734 - DNA, 20 bp, Artificial Sequence
  Description of Artificial Sequence: Synthetic oligonucleotide
caagaactctgtgagctccg

SEQ ID NO: 3735 - DNA, 20 bp, Artificial Sequence
  Description of Artificial Sequence: Synthetic oligonucleotide
aagaactctgtgagctccgc

SEQ ID NO: 3736 - DNA, 20 bp, Artificial Sequence
  Description of Artificial Sequence: Synthetic oligonucleotide
agaactctgtgagctccgcc

SEQ ID NO: 3737 - DNA, 20 bp, Artificial Sequence
  Description of Artificial Sequence: Synthetic oligonucleotide
gaactctgtgagctccgccc

SEQ ID NO: 3738 - DNA, 20 bp, Artificial Sequence
  Description of Artificial Sequence: Synthetic oligonucleotide
aactctgtgagctccgccca

SEQ ID NO: 3739 - DNA, 20 bp, Artificial Sequence
  Description of Artificial Sequence: Synthetic oligonucleotide
actctgtgagctccgcccag

SEQ ID NO: 3740 - DNA, 20 bp, Artificial Sequence
  Description of Artificial Sequence: Synthetic oligonucleotide
ctctgtgagctccgcccaga

SEQ ID NO: 3741 - DNA, 20 bp, Artificial Sequence
  Description of Artificial Sequence: Synthetic oligonucleotide
tctgtgagctccgcccagat

SEQ ID NO: 3742 - DNA, 20 bp, Artificial Sequence
  Description of Artificial Sequence: Synthetic oligonucleotide
ctgtgagctccgcccagata

SEQ ID NO: 3743 - DNA, 20 bp, Artificial Sequence
  Description of Artificial Sequence: Synthetic oligonucleotide
tgtgagctccgcccagatac

SEQ ID NO: 3744 - DNA, 20 bp, Artificial Sequence
  Description of Artificial Sequence: Synthetic oligonucleotide
gtgagctccgcccagatacc

SEQ ID NO: 3745 - DNA, 20 bp, Artificial Sequence
  Description of Artificial Sequence: Synthetic oligonucleotide
tgagctccgcccagatacca

SEQ ID NO: 3746 - DNA, 20 bp, Artificial Sequence
  Description of Artificial Sequence: Synthetic oligonucleotide
gagctccgcccagataccat

SEQ ID NO: 3747 - DNA, 20 bp, Artificial Sequence
  Description of Artificial Sequence: Synthetic oligonucleotide
agctccgcccagataccatt

SEQ ID NO: 3748 - DNA, 20 bp, Artificial Sequence
  Description of Artificial Sequence: Synthetic oligonucleotide
gctccgcccagataccattg

SEQ ID NO: 3749 - DNA, 20 bp, Artificial Sequence
  Description of Artificial Sequence: Synthetic oligonucleotide
ctccgcccagataccattgg

SEQ ID NO: 3750 - DNA, 20 bp, Artificial Sequence
  Description of Artificial Sequence: Synthetic oligonucleotide
tccgcccagataccattggc

SEQ ID NO: 3751 - DNA, 20 bp, Artificial Sequence
  Description of Artificial Sequence: Synthetic oligonucleotide
ccgcccagataccattggcg

SEQ ID NO: 3752 - DNA, 20 bp, Artificial Sequence
  Description of Artificial Sequence: Synthetic oligonucleotide
cgcccagataccattggcgc

SEQ ID NO: 3753 - DNA, 20 bp, Artificial Sequence
  Description of Artificial Sequence: Synthetic oligonucleotide
gcccagataccattggcgcc

SEQ ID NO: 3754 - DNA, 20 bp, Artificial Sequence
  Description of Artificial Sequence: Synthetic oligonucleotide
cccagataccattggcgcct

SEQ ID NO: 3755 - DNA, 20 bp, Artificial Sequence
  Description of Artificial Sequence: Synthetic oligonucleotide
ccagataccattggcgcctg

SEQ ID NO: 3756 - DNA, 20 bp, Artificial Sequence
  Description of Artificial Sequence: Synthetic oligonucleotide
cagataccattggcgcctgc

SEQ ID NO: 3757 - DNA, 20 bp, Artificial Sequence
  Description of Artificial Sequence: Synthetic oligonucleotide
agataccattggcgcctgct

SEQ ID NO: 3758 - DNA, 20 bp, Artificial Sequence
  Description of Artificial Sequence: Synthetic oligonucleotide
gataccattggcgcctgctt

SEQ ID NO: 3759 - DNA, 20 bp, Artificial Sequence
  Description of Artificial Sequence: Synthetic oligonucleotide
ataccattggcgcctgcttg

SEQ ID NO: 3760 - DNA, 20 bp, Artificial Sequence
  Description of Artificial Sequence: Synthetic oligonucleotide
taccattggcgcctgcttgt

SEQ ID NO: 3761 - DNA, 20 bp, Artificial Sequence
  Description of Artificial Sequence: Synthetic oligonucleotide
accattggcgcctgcttgtg

SEQ ID NO: 3762 - DNA, 20 bp, Artificial Sequence
  Description of Artificial Sequence: Synthetic oligonucleotide
ccattggcgcctgcttgtgt

SEQ ID NO: 3763 - DNA, 20 bp, Artificial Sequence
  Description of Artificial Sequence: Synthetic oligonucleotide
cattggcgcctgcttgtgtc

SEQ ID NO: 3764 - DNA, 20 bp, Artificial Sequence
  Description of Artificial Sequence: Synthetic oligonucleotide
attggcgcctgcttgtgtcc

SEQ ID NO: 3765 - DNA, 20 bp, Artificial Sequence
  Description of Artificial Sequence: Synthetic oligonucleotide
ttggcgcctgcttgtgtccc

SEQ ID NO: 3766 - DNA, 20 bp, Artificial Sequence
  Description of Artificial Sequence: Synthetic oligonucleotide
tggcgcctgcttgtgtcccc

SEQ ID NO: 3767 - DNA, 20 bp, Artificial Sequence
  Description of Artificial Sequence: Synthetic oligonucleotide
ggcgcctgcttgtgtcccca

SEQ ID NO: 3768 - DNA, 20 bp, Artificial Sequence
  Description of Artificial Sequence: Synthetic oligonucleotide
gcgcctgcttgtgtccccag

SEQ ID NO: 3769 - DNA, 20 bp, Artificial Sequence
  Description of Artificial Sequence: Synthetic oligonucleotide
cgcctgcttgtgtccccagg

SEQ ID NO: 3770 - DNA, 20 bp, Artificial Sequence
  Description of Artificial Sequence: Synthetic oligonucleotide
gcctgcttgtgtccccaggg

SEQ ID NO: 3771 - DNA, 20 bp, Artificial Sequence
  Description of Artificial Sequence: Synthetic oligonucleotide
cctgcttgtgtccccagggg

SEQ ID NO: 3772 - DNA, 20 bp, Artificial Sequence
  Description of Artificial Sequence: Synthetic oligonucleotide
ctgcttgtgtccccagggga

SEQ ID NO: 3773 - DNA, 20 bp, Artificial Sequence
  Description of Artificial Sequence: Synthetic oligonucleotide
tgcttgtgtccccaggggac

SEQ ID NO: 3774 - DNA, 20 bp, Artificial Sequence
  Description of Artificial Sequence: Synthetic oligonucleotide
gcttgtgtccccaggggacc

SEQ ID NO: 3775 - DNA, 20 bp, Artificial Sequence
  Description of Artificial Sequence: Synthetic oligonucleotide
cttgtgtccccaggggacct

SEQ ID NO: 3776 - DNA, 20 bp, Artificial Sequence
  Description of Artificial Sequence: Synthetic oligonucleotide
ttgtgtccccaggggaccta

SEQ ID NO: 3777 - DNA, 20 bp, Artificial Sequence
  Description of Artificial Sequence: Synthetic oligonucleotide
tgtgtccccaggggacctac

SEQ ID NO: 3778 - DNA, 20 bp, Artificial Sequence
  Description of Artificial Sequence: Synthetic oligonucleotide
gtgtccccaggggacctaca

SEQ ID NO: 3779 - DNA, 20 bp, Artificial Sequence
  Description of Artificial Sequence: Synthetic oligonucleotide
tgtccccaggggacctacac

SEQ ID NO: 3780 - DNA, 20 bp, Artificial Sequence
  Description of Artificial Sequence: Synthetic oligonucleotide
gtccccaggggacctacaca

SEQ ID NO: 3781 - DNA, 20 bp, Artificial Sequence
  Description of Artificial Sequence: Synthetic oligonucleotide
tccccaggggacctacacac

SEQ ID NO: 3782 - DNA, 20 bp, Artificial Sequence
  Description of Artificial Sequence: Synthetic oligonucleotide
ccccaggggacctacacaca

SEQ ID NO: 3783 - DNA, 20 bp, Artificial Sequence
  Description of Artificial Sequence: Synthetic oligonucleotide
cccaggggacctacacacaa

SEQ ID NO: 3784 - DNA, 20 bp, Artificial Sequence
  Description of Artificial Sequence: Synthetic oligonucleotide
ccaggggacctacacacaac

SEQ ID NO: 3785 - DNA, 20 bp, Artificial Sequence
  Description of Artificial Sequence: Synthetic oligonucleotide
caggggacctacacacaaca

SEQ ID NO: 3786 - DNA, 20 bp, Artificial Sequence
  Description of Artificial Sequence: Synthetic oligonucleotide
aggggacctacacacaacag

SEQ ID NO: 3787 - DNA, 20 bp, Artificial Sequence
  Description of Artificial Sequence: Synthetic oligonucleotide
ggggacctacacacaacagc

SEQ ID NO: 3788 - DNA, 20 bp, Artificial Sequence
  Description of Artificial Sequence: Synthetic oligonucleotide
gggacctacacacaacagca

SEQ ID NO: 3789 - DNA, 20 bp, Artificial Sequence
  Description of Artificial Sequence: Synthetic oligonucleotide
ggacctacacacaacagcac

SEQ ID NO: 3790 - DNA, 20 bp, Artificial Sequence
  Description of Artificial Sequence: Synthetic oligonucleotide
gacctacacacaacagcacc

SEQ ID NO: 3791 - DNA, 20 bp, Artificial Sequence
  Description of Artificial Sequence: Synthetic oligonucleotide
acctacacacaacagcacca

SEQ ID NO: 3792 - DNA, 20 bp, Artificial Sequence
  Description of Artificial Sequence: Synthetic oligonucleotide
cctacacacaacagcaccag

SEQ ID NO: 3793 - DNA, 20 bp, Artificial Sequence
  Description of Artificial Sequence: Synthetic oligonucleotide
ctacacacaacagcaccagc

SEQ ID NO: 3794 - DNA, 20 bp, Artificial Sequence
  Description of Artificial Sequence: Synthetic oligonucleotide
tacacacaacagcaccagca

SEQ ID NO: 3795 - DNA, 20 bp, Artificial Sequence
  Description of Artificial Sequence: Synthetic oligonucleotide
acacacaacagcaccagcac

SEQ ID NO: 3796 - DNA, 20 bp, Artificial Sequence
  Description of Artificial Sequence: Synthetic oligonucleotide
cacacaacagcaccagcacc

SEQ ID NO: 3797 - DNA, 20 bp, Artificial Sequence
  Description of Artificial Sequence: Synthetic oligonucleotide
acacaacagcaccagcacca

SEQ ID NO: 3798 - DNA, 20 bp, Artificial Sequence
  Description of Artificial Sequence: Synthetic oligonucleotide
cacaacagcaccagcaccat

SEQ ID NO: 3799 - DNA, 20 bp, Artificial Sequence
  Description of Artificial Sequence: Synthetic oligonucleotide
acaacagcaccagcaccatg

SEQ ID NO: 3800 - DNA, 20 bp, Artificial Sequence
  Description of Artificial Sequence: Synthetic oligonucleotide
caacagcaccagcaccatga

SEQ ID NO: 3801 - DNA, 20 bp, Artificial Sequence
  Description of Artificial Sequence: Synthetic oligonucleotide
aacagcaccagcaccatgag

SEQ ID NO: 3802 - DNA, 20 bp, Artificial Sequence
  Description of Artificial Sequence: Synthetic oligonucleotide
acagcaccagcaccatgagg

SEQ ID NO: 3803 - DNA, 20 bp, Artificial Sequence
  Description of Artificial Sequence: Synthetic oligonucleotide
cagcaccagcaccatgaggg

SEQ ID NO: 3804 - DNA, 20 bp, Artificial Sequence
  Description of Artificial Sequence: Synthetic oligonucleotide
agcaccagcaccatgagggc

SEQ ID NO: 3805 - DNA, 20 bp, Artificial Sequence
  Description of Artificial Sequence: Synthetic oligonucleotide
gcaccagcaccatgagggcg

SEQ ID NO: 3806 - DNA, 20 bp, Artificial Sequence
  Description of Artificial Sequence: Synthetic oligonucleotide
caccagcaccatgagggcgc

SEQ ID NO: 3807 - DNA, 20 bp, Artificial Sequence
  Description of Artificial Sequence: Synthetic oligonucleotide
accagcaccatgagggcgct

SEQ ID NO: 3808 - DNA, 20 bp, Artificial Sequence
  Description of Artificial Sequence: Synthetic oligonucleotide
ccagcaccatgagggcgctc

SEQ ID NO: 3809 - DNA, 20 bp, Artificial Sequence
  Description of Artificial Sequence: Synthetic oligonucleotide
cagcaccatgagggcgctct

SEQ ID NO: 3810 - DNA, 20 bp, Artificial Sequence
  Description of Artificial Sequence: Synthetic oligonucleotide
agcaccatgagggcgctctc

SEQ ID NO: 3811 - DNA, 20 bp, Artificial Sequence
  Description of Artificial Sequence: Synthetic oligonucleotide
gcaccatgagggcgctctcg

SEQ ID NO: 3812 - DNA, 20 bp, Artificial Sequence
  Description of Artificial Sequence: Synthetic oligonucleotide
caccatgagggcgctctcga

SEQ ID NO: 3813 - DNA, 20 bp, Artificial Sequence
  Description of Artificial Sequence: Synthetic oligonucleotide
accatgagggcgctctcgac

SEQ ID NO: 3814 - DNA, 20 bp, Artificial Sequence
  Description of Artificial Sequence: Synthetic oligonucleotide
ccatgagggcgctctcgacc

SEQ ID NO: 3815 - DNA, 20 bp, Artificial Sequence
  Description of Artificial Sequence: Synthetic oligonucleotide
catgagggcgctctcgaccc

SEQ ID NO: 3816 - DNA, 20 bp, Artificial Sequence
  Description of Artificial Sequence: Synthetic oligonucleotide
atgagggcgctctcgaccca

SEQ ID NO: 3817 - DNA, 20 bp, Artificial Sequence
  Description of Artificial Sequence: Synthetic oligonucleotide
tgagggcgctctcgacccac

SEQ ID NO: 3818 - DNA, 20 bp, Artificial Sequence
  Description of Artificial Sequence: Synthetic oligonucleotide
gagggcgctctcgacccaca

SEQ ID NO: 3819 - DNA, 20 bp, Artificial Sequence
  Description of Artificial Sequence: Synthetic oligonucleotide
agggcgctctcgacccacac

SEQ ID NO: 3820 - DNA, 20 bp, Artificial Sequence
  Description of Artificial Sequence: Synthetic oligonucleotide
gggcgctctcgacccacaca

SEQ ID NO: 3821 - DNA, 20 bp, Artificial Sequence
  Description of Artificial Sequence: Synthetic oligonucleotide
ggcgctctcgacccacacaa

SEQ ID NO: 3822 - DNA, 20 bp, Artificial Sequence
  Description of Artificial Sequence: Synthetic oligonucleotide
gcgctctcgacccacacaag

SEQ ID NO: 3823 - DNA, 20 bp, Artificial Sequence
  Description of Artificial Sequence: Synthetic oligonucleotide
cgctctcgacccacacaagc

SEQ ID NO: 3824 - DNA, 20 bp, Artificial Sequence
  Description of Artificial Sequence: Synthetic oligonucleotide
gctctcgacccacacaagcc

SEQ ID NO: 3825 - DNA, 20 bp, Artificial Sequence
  Description of Artificial Sequence: Synthetic oligonucleotide
ctctcgacccacacaagccc

SEQ ID NO: 3826 - DNA, 20 bp, Artificial Sequence
  Description of Artificial Sequence: Synthetic oligonucleotide
tctcgacccacacaagccct

SEQ ID NO: 3827 - DNA, 20 bp, Artificial Sequence
  Description of Artificial Sequence: Synthetic oligonucleotide
ctcgacccacacaagccctg

SEQ ID NO: 3828 - DNA, 20 bp, Artificial Sequence
  Description of Artificial Sequence: Synthetic oligonucleotide
tcgacccacacaagccctgg

SEQ ID NO: 3829 - DNA, 20 bp, Artificial Sequence
  Description of Artificial Sequence: Synthetic oligonucleotide
cgacccacacaagccctggt

SEQ ID NO: 3830 - DNA, 20 bp, Artificial Sequence
  Description of Artificial Sequence: Synthetic oligonucleotide
gacccacacaagccctggtc

SEQ ID NO: 3831 - DNA, 20 bp, Artificial Sequence
  Description of Artificial Sequence: Synthetic oligonucleotide
acccacacaagccctggtcc

SEQ ID NO: 3832 - DNA, 20 bp, Artificial Sequence
  Description of Artificial Sequence: Synthetic oligonucleotide
cccacacaagccctggtccc

SEQ ID NO: 3833 - DNA, 20 bp, Artificial Sequence
  Description of Artificial Sequence: Synthetic oligonucleotide
ccacacaagccctggtcccc

SEQ ID NO: 3834 - DNA, 20 bp, Artificial Sequence
  Description of Artificial Sequence: Synthetic oligonucleotide
cacacaagccctggtccccg

SEQ ID NO: 3835 - DNA, 20 bp, Artificial Sequence
  Description of Artificial Sequence: Synthetic oligonucleotide
acacaagccctggtccccgt

SEQ ID NO: 3836 - DNA, 20 bp, Artificial Sequence
  Description of Artificial Sequence: Synthetic oligonucleotide
cacaagccctggtccccgtc

SEQ ID NO: 3837 - DNA, 20 bp, Artificial Sequence
  Description of Artificial Sequence: Synthetic oligonucleotide
acaagccctggtccccgtca

SEQ ID NO: 3838 - DNA, 20 bp, Artificial Sequence
  Description of Artificial Sequence: Synthetic oligonucleotide
caagccctggtccccgtcag

SEQ ID NO: 3839 - DNA, 20 bp, Artificial Sequence
  Description of Artificial Sequence: Synthetic oligonucleotide
aagccctggtccccgtcagt

SEQ ID NO: 3840 - DNA, 20 bp, Artificial Sequence
  Description of Artificial Sequence: Synthetic oligonucleotide
agccctggtccccgtcagtc

SEQ ID NO: 3841 - DNA, 20 bp, Artificial Sequence
  Description of Artificial Sequence: Synthetic oligonucleotide
gccctggtccccgtcagtca

SEQ ID NO: 3842 - DNA, 20 bp, Artificial Sequence
  Description of Artificial Sequence: Synthetic oligonucleotide
ccctggtccccgtcagtcaa

SEQ ID NO: 3843 - DNA, 20 bp, Artificial Sequence
  Description of Artificial Sequence: Synthetic oligonucleotide
cctggtccccgtcagtcaat

SEQ ID NO: 3844 - DNA, 20 bp, Artificial Sequence
  Description of Artificial Sequence: Synthetic oligonucleotide
ctggtccccgtcagtcaatg

SEQ ID NO: 3845 - DNA, 20 bp, Artificial Sequence
  Description of Artificial Sequence: Synthetic oligonucleotide
tggtccccgtcagtcaatgt

SEQ ID NO: 3846 - DNA, 20 bp, Artificial Sequence
  Description of Artificial Sequence: Synthetic oligonucleotide
ggtccccgtcagtcaatgtg

SEQ ID NO: 3847 - DNA, 20 bp, Artificial Sequence
  Description of Artificial Sequence: Synthetic oligonucleotide
gtccccgtcagtcaatgtga

SEQ ID NO: 3848 - DNA, 20 bp, Artificial Sequence
  Description of Artificial Sequence: Synthetic oligonucleotide
tccccgtcagtcaatgtgac

SEQ ID NO: 3849 - DNA, 20 bp, Artificial Sequence
  Description of Artificial Sequence: Synthetic oligonucleotide
ccccgtcagtcaatgtgact

SEQ ID NO: 3850 - DNA, 20 bp, Artificial Sequence
  Description of Artificial Sequence: Synthetic oligonucleotide
cccgtcagtcaatgtgactg

SEQ ID NO: 3851 - DNA, 20 bp, Artificial Sequence
  Description of Artificial Sequence: Synthetic oligonucleotide
ccgtcagtcaatgtgactga

SEQ ID NO: 3852 - DNA, 20 bp, Artificial Sequence
  Description of Artificial Sequence: Synthetic oligonucleotide
cgtcagtcaatgtgactgag

SEQ ID NO: 3853 - DNA, 20 bp, Artificial Sequence
  Description of Artificial Sequence: Synthetic oligonucleotide
gtcagtcaatgtgactgagt

SEQ ID NO: 3854 - DNA, 20 bp, Artificial Sequence
  Description of Artificial Sequence: Synthetic oligonucleotide
tcagtcaatgtgactgagtc

SEQ ID NO: 3855 - DNA, 20 bp, Artificial Sequence
  Description of Artificial Sequence: Synthetic oligonucleotide
cagtcaatgtgactgagtcc

SEQ ID NO: 3856 - DNA, 20 bp, Artificial Sequence
  Description of Artificial Sequence: Synthetic oligonucleotide
agtcaatgtgactgagtccg

SEQ ID NO: 3857 - DNA, 20 bp, Artificial Sequence
  Description of Artificial Sequence: Synthetic oligonucleotide
gtcaatgtgactgagtccgc

SEQ ID NO: 3858 - DNA, 20 bp, Artificial Sequence
  Description of Artificial Sequence: Synthetic oligonucleotide
tcaatgtgactgagtccgcc

SEQ ID NO: 3859 - DNA, 20 bp, Artificial Sequence
  Description of Artificial Sequence: Synthetic oligonucleotide
caatgtgactgagtccgcca

SEQ ID NO: 3860 - DNA, 20 bp, Artificial Sequence
  Description of Artificial Sequence: Synthetic oligonucleotide
aatgtgactgagtccgccat

SEQ ID NO: 3861 - DNA, 20 bp, Artificial Sequence
  Description of Artificial Sequence: Synthetic oligonucleotide
atgtgactgagtccgccatt

SEQ ID NO: 3862 - DNA, 20 bp, Artificial Sequence
  Description of Artificial Sequence: Synthetic oligonucleotide
tgtgactgagtccgccattg

SEQ ID NO: 3863 - DNA, 20 bp, Artificial Sequence
  Description of Artificial Sequence: Synthetic oligonucleotide
gtgactgagtccgccattga

SEQ ID NO: 3864 - DNA, 20 bp, Artificial Sequence
  Description of Artificial Sequence: Synthetic oligonucleotide
tgactgagtccgccattgag

SEQ ID NO: 3865 - DNA, 20 bp, Artificial Sequence
  Description of Artificial Sequence: Synthetic oligonucleotide
gactgagtccgccattgagg

SEQ ID NO: 3866 - DNA, 20 bp, Artificial Sequence
  Description of Artificial Sequence: Synthetic oligonucleotide
actgagtccgccattgaggc

SEQ ID NO: 3867 - DNA, 20 bp, Artificial Sequence
  Description of Artificial Sequence: Synthetic oligonucleotide
ctgagtccgccattgaggcc

SEQ ID NO: 3868 - DNA, 20 bp, Artificial Sequence
  Description of Artificial Sequence: Synthetic oligonucleotide
tgagtccgccattgaggcca

SEQ ID NO: 3869 - DNA, 20 bp, Artificial Sequence
  Description of Artificial Sequence: Synthetic oligonucleotide
gagtccgccattgaggccag

SEQ ID NO: 3870 - DNA, 20 bp, Artificial Sequence
  Description of Artificial Sequence: Synthetic oligonucleotide
agtccgccattgaggccagt

SEQ ID NO: 3871 - DNA, 20 bp, Artificial Sequence
  Description of Artificial Sequence: Synthetic oligonucleotide
gtccgccattgaggccagtc

SEQ ID NO: 3872 - DNA, 20 bp, Artificial Sequence
  Description of Artificial Sequence: Synthetic oligonucleotide
tccgccattgaggccagtct

SEQ ID NO: 3873 - DNA, 20 bp, Artificial Sequence
  Description of Artificial Sequence: Synthetic oligonucleotide
ccgccattgaggccagtctg

SEQ ID NO: 3874 - DNA, 20 bp, Artificial Sequence
  Description of Artificial Sequence: Synthetic oligonucleotide
cgccattgaggccagtctgg

SEQ ID NO: 3875 - DNA, 20 bp, Artificial Sequence
  Description of Artificial Sequence: Synthetic oligonucleotide
gccattgaggccagtctggc

SEQ ID NO: 3876 - DNA, 20 bp, Artificial Sequence
  Description of Artificial Sequence: Synthetic oligonucleotide
ccattgaggccagtctggct

SEQ ID NO: 3877 - DNA, 20 bp, Artificial Sequence
  Description of Artificial Sequence: Synthetic oligonucleotide
cattgaggccagtctggctg

SEQ ID NO: 3878 - DNA, 20 bp, Artificial Sequence
  Description of Artificial Sequence: Synthetic oligonucleotide
attgaggccagtctggctgg

SEQ ID NO: 3879 - DNA, 20 bp, Artificial Sequence
  Description of Artificial Sequence: Synthetic oligonucleotide
ttgaggccagtctggctggc

SEQ ID NO: 3880 - DNA, 20 bp, Artificial Sequence
  Description of Artificial Sequence: Synthetic oligonucleotide
tgaggccagtctggctggcc

SEQ ID NO: 3881 - DNA, 20 bp, Artificial Sequence
  Description of Artificial Sequence: Synthetic oligonucleotide
gaggccagtctggctggccc

SEQ ID NO: 3882 - DNA, 20 bp, Artificial Sequence
  Description of Artificial Sequence: Synthetic oligonucleotide
aggccagtctggctggcccc

SEQ ID NO: 3883 - DNA, 20 bp, Artificial Sequence
  Description of Artificial Sequence: Synthetic oligonucleotide
ggccagtctggctggcccca

SEQ ID NO: 3884 - DNA, 20 bp, Artificial Sequence
  Description of Artificial Sequence: Synthetic oligonucleotide
gccagtctggctggccccaa

SEQ ID NO: 3885 - DNA, 20 bp, Artificial Sequence
  Description of Artificial Sequence: Synthetic oligonucleotide
ccagtctggctggccccaag

SEQ ID NO: 3886 - DNA, 20 bp, Artificial Sequence
  Description of Artificial Sequence: Synthetic oligonucleotide
cagtctggctggccccaagt

SEQ ID NO: 3887 - DNA, 20 bp, Artificial Sequence
  Description of Artificial Sequence: Synthetic oligonucleotide
agtctggctggccccaagtg

SEQ ID NO: 3888 - DNA, 20 bp, Artificial Sequence
  Description of Artificial Sequence: Synthetic oligonucleotide
gtctggctggccccaagtgg

SEQ ID NO: 3889 - DNA, 20 bp, Artificial Sequence
  Description of Artificial Sequence: Synthetic oligonucleotide
tctggctggccccaagtggt

SEQ ID NO: 3890 - DNA, 20 bp, Artificial Sequence
  Description of Artificial Sequence: Synthetic oligonucleotide
ctggctggccccaagtggtc

SEQ ID NO: 3891 - DNA, 20 bp, Artificial Sequence
  Description of Artificial Sequence: Synthetic oligonucleotide
tggctggccccaagtggtcc

SEQ ID NO: 3892 - DNA, 20 bp, Artificial Sequence
  Description of Artificial Sequence: Synthetic oligonucleotide
ggctggccccaagtggtccc

SEQ ID NO: 3893 - DNA, 20 bp, Artificial Sequence
  Description of Artificial Sequence: Synthetic oligonucleotide
gctggccccaagtggtccct

SEQ ID NO: 3894 - DNA, 20 bp, Artificial Sequence
  Description of Artificial Sequence: Synthetic oligonucleotide
ctggccccaagtggtccctc

SEQ ID NO: 3895 - DNA, 20 bp, Artificial Sequence
  Description of Artificial Sequence: Synthetic oligonucleotide
tggccccaagtggtccctct

SEQ ID NO: 3896 - DNA, 20 bp, Artificial Sequence
  Description of Artificial Sequence: Synthetic oligonucleotide
ggccccaagtggtccctctg

SEQ ID NO: 3897 - DNA, 20 bp, Artificial Sequence
  Description of Artificial Sequence: Synthetic oligonucleotide
gccccaagtggtccctctga

SEQ ID NO: 3898 - DNA, 20 bp, Artificial Sequence
  Description of Artificial Sequence: Synthetic oligonucleotide
ccccaagtggtccctctgag

SEQ ID NO: 3899 - DNA, 20 bp, Artificial Sequence
  Description of Artificial Sequence: Synthetic oligonucleotide
cccaagtggtccctctgagt

SEQ ID NO: 3900 - DNA, 20 bp, Artificial Sequence
  Description of Artificial Sequence: Synthetic oligonucleotide
ccaagtggtccctctgagtc

SEQ ID NO: 3901 - DNA, 20 bp, Artificial Sequence
  Description of Artificial Sequence: Synthetic oligonucleotide
caagtggtccctctgagtcc

SEQ ID NO: 3902 - DNA, 20 bp, Artificial Sequence
  Description of Artificial Sequence: Synthetic oligonucleotide
aagtggtccctctgagtccc

SEQ ID NO: 3903 - DNA, 20 bp, Artificial Sequence
  Description of Artificial Sequence: Synthetic oligonucleotide
agtggtccctctgagtcccc

SEQ ID NO: 3904 - DNA, 20 bp, Artificial Sequence
  Description of Artificial Sequence: Synthetic oligonucleotide
gtggtccctctgagtcccca

SEQ ID NO: 3905 - DNA, 20 bp, Artificial Sequence
  Description of Artificial Sequence: Synthetic oligonucleotide
tggtccctctgagtccccaa

SEQ ID NO: 3906 - DNA, 20 bp, Artificial Sequence
  Description of Artificial Sequence: Synthetic oligonucleotide
ggtccctctgagtccccaac

SEQ ID NO: 3907 - DNA, 20 bp, Artificial Sequence
  Description of Artificial Sequence: Synthetic oligonucleotide
gtccctctgagtccccaact

SEQ ID NO: 3908 - DNA, 20 bp, Artificial Sequence
  Description of Artificial Sequence: Synthetic oligonucleotide
tccctctgagtccccaactc

SEQ ID NO: 3909 - DNA, 20 bp, Artificial Sequence
  Description of Artificial Sequence: Synthetic oligonucleotide
ccctctgagtccccaactcc

SEQ ID NO: 3910 - DNA, 20 bp, Artificial Sequence
  Description of Artificial Sequence: Synthetic oligonucleotide
cctctgagtccccaactccc

SEQ ID NO: 3911 - DNA, 20 bp, Artificial Sequence
  Description of Artificial Sequence: Synthetic oligonucleotide
ctctgagtccccaactccct

SEQ ID NO: 3912 - DNA, 20 bp, Artificial Sequence
  Description of Artificial Sequence: Synthetic oligonucleotide
tctgagtccccaactccctg

SEQ ID NO: 3913 - DNA, 20 bp, Artificial Sequence
  Description of Artificial Sequence: Synthetic oligonucleotide
ctgagtccccaactccctgg

SEQ ID NO: 3914 - DNA, 20 bp, Artificial Sequence
  Description of Artificial Sequence: Synthetic oligonucleotide
tgagtccccaactccctggc

SEQ ID NO: 3915 - DNA, 20 bp, Artificial Sequence
  Description of Artificial Sequence: Synthetic oligonucleotide
gagtccccaactccctggcc

SEQ ID NO: 3916 - DNA, 20 bp, Artificial Sequence
  Description of Artificial Sequence: Synthetic oligonucleotide
agtccccaactccctggcca

SEQ ID NO: 3917 - DNA, 20 bp, Artificial Sequence
  Description of Artificial Sequence: Synthetic oligonucleotide
gtccccaactccctggccag

SEQ ID NO: 3918 - DNA, 20 bp, Artificial Sequence
  Description of Artificial Sequence: Synthetic oligonucleotide
tccccaactccctggccagc

SEQ ID NO: 3919 - DNA, 20 bp, Artificial Sequence
  Description of Artificial Sequence: Synthetic oligonucleotide
ccccaactccctggccagca

SEQ ID NO: 3920 - DNA, 20 bp, Artificial Sequence
  Description of Artificial Sequence: Synthetic oligonucleotide
cccaactccctggccagcaa

SEQ ID NO: 3921 - DNA, 20 bp, Artificial Sequence
  Description of Artificial Sequence: Synthetic oligonucleotide
ccaactccctggccagcaag

SEQ ID NO: 3922 - DNA, 20 bp, Artificial Sequence
  Description of Artificial Sequence: Synthetic oligonucleotide
caactccctggccagcaagg

SEQ ID NO: 3923 - DNA, 20 bp, Artificial Sequence
  Description of Artificial Sequence: Synthetic oligonucleotide
aactccctggccagcaagga

SEQ ID NO: 3924 - DNA, 20 bp, Artificial Sequence
  Description of Artificial Sequence: Synthetic oligonucleotide
actccctggccagcaaggag

SEQ ID NO: 3925 - DNA, 20 bp, Artificial Sequence
  Description of Artificial Sequence: Synthetic oligonucleotide
ctccctggccagcaaggagt

SEQ ID NO: 3926 - DNA, 20 bp, Artificial Sequence
  Description of Artificial Sequence: Synthetic oligonucleotide
tccctggccagcaaggagtg

SEQ ID NO: 3927 - DNA, 20 bp, Artificial Sequence
  Description of Artificial Sequence: Synthetic oligonucleotide
ccctggccagcaaggagtga

SEQ ID NO: 3928 - DNA, 20 bp, Artificial Sequence
  Description of Artificial Sequence: Synthetic oligonucleotide
cctggccagcaaggagtgaa

SEQ ID NO: 3929 - DNA, 20 bp, Artificial Sequence
  Description of Artificial Sequence: Synthetic oligonucleotide
ctggccagcaaggagtgaag

SEQ ID NO: 3930 - DNA, 20 bp, Artificial Sequence
  Description of Artificial Sequence: Synthetic oligonucleotide
tggccagcaaggagtgaagc

SEQ ID NO: 3931 - DNA, 20 bp, Artificial Sequence
  Description of Artificial Sequence: Synthetic oligonucleotide
ggccagcaaggagtgaagct

SEQ ID NO: 3932 - DNA, 20 bp, Artificial Sequence
  Description of Artificial Sequence: Synthetic oligonucleotide
gccagcaaggagtgaagctc

SEQ ID NO: 3933 - DNA, 20 bp, Artificial Sequence
  Description of Artificial Sequence: Synthetic oligonucleotide
ccagcaaggagtgaagctcc

SEQ ID NO: 3934 - DNA, 20 bp, Artificial Sequence
  Description of Artificial Sequence: Synthetic oligonucleotide
cagcaaggagtgaagctcca

SEQ ID NO: 3935 - DNA, 20 bp, Artificial Sequence
  Description of Artificial Sequence: Synthetic oligonucleotide
agcaaggagtgaagctccat

SEQ ID NO: 3936 - DNA, 20 bp, Artificial Sequence
  Description of Artificial Sequence: Synthetic oligonucleotide
gcaaggagtgaagctccatg

SEQ ID NO: 3937 - DNA, 20 bp, Artificial Sequence
  Description of Artificial Sequence: Synthetic oligonucleotide
caaggagtgaagctccatgc

SEQ ID NO: 3938 - DNA, 20 bp, Artificial Sequence
  Description of Artificial Sequence: Synthetic oligonucleotide
aaggagtgaagctccatgcc

SEQ ID NO: 3939 - DNA, 20 bp, Artificial Sequence
  Description of Artificial Sequence: Synthetic oligonucleotide
aggagtgaagctccatgccc

SEQ ID NO: 3940 - DNA, 20 bp, Artificial Sequence
  Description of Artificial Sequence: Synthetic oligonucleotide
ggagtgaagctccatgcccc

SEQ ID NO: 3941 - DNA, 20 bp, Artificial Sequence
  Description of Artificial Sequence: Synthetic oligonucleotide
gagtgaagctccatgcccct

SEQ ID NO: 3942 - DNA, 20 bp, Artificial Sequence
  Description of Artificial Sequence: Synthetic oligonucleotide
agtgaagctccatgcccctt

SEQ ID NO: 3943 - DNA, 20 bp, Artificial Sequence
  Description of Artificial Sequence: Synthetic oligonucleotide
gtgaagctccatgccccttg

SEQ ID NO: 3944 - DNA, 20 bp, Artificial Sequence
  Description of Artificial Sequence: Synthetic oligonucleotide
tgaagctccatgccccttgg

SEQ ID NO: 3945 - DNA, 20 bp, Artificial Sequence
  Description of Artificial Sequence: Synthetic oligonucleotide
gaagctccatgccccttggt

SEQ ID NO: 3946 - DNA, 20 bp, Artificial Sequence
  Description of Artificial Sequence: Synthetic oligonucleotide
aagctccatgccccttggtc

SEQ ID NO: 3947 - DNA, 20 bp, Artificial Sequence
  Description of Artificial Sequence: Synthetic oligonucleotide
agctccatgccccttggtcc

SEQ ID NO: 3948 - DNA, 20 bp, Artificial Sequence
  Description of Artificial Sequence: Synthetic oligonucleotide
gctccatgccccttggtcca

SEQ ID NO: 3949 - DNA, 20 bp, Artificial Sequence
  Description of Artificial Sequence: Synthetic oligonucleotide
ctccatgccccttggtccac

SEQ ID NO: 3950 - DNA, 20 bp, Artificial Sequence
  Description of Artificial Sequence: Synthetic oligonucleotide
tccatgccccttggtccacg

SEQ ID NO: 3951 - DNA, 20 bp, Artificial Sequence
  Description of Artificial Sequence: Synthetic oligonucleotide
ccatgccccttggtccacgc

SEQ ID NO: 3952 - DNA, 20 bp, Artificial Sequence
  Description of Artificial Sequence: Synthetic oligonucleotide
catgccccttggtccacgcc

SEQ ID NO: 3953 - DNA, 20 bp, Artificial Sequence
  Description of Artificial Sequence: Synthetic oligonucleotide
atgccccttggtccacgcct

SEQ ID NO: 3954 - DNA, 20 bp, Artificial Sequence
  Description of Artificial Sequence: Synthetic oligonucleotide
tgccccttggtccacgcctc

SEQ ID NO: 3955 - DNA, 20 bp, Artificial Sequence
  Description of Artificial Sequence: Synthetic oligonucleotide
gccccttggtccacgcctct

SEQ ID NO: 3956 - DNA, 20 bp, Artificial Sequence
  Description of Artificial Sequence: Synthetic oligonucleotide
ccccttggtccacgcctcta

SEQ ID NO: 3957 - DNA, 20 bp, Artificial Sequence
  Description of Artificial Sequence: Synthetic oligonucleotide
cccttggtccacgcctctag

SEQ ID NO: 3958 - DNA, 20 bp, Artificial Sequence
  Description of Artificial Sequence: Synthetic oligonucleotide
ccttggtccacgcctctaga

SEQ ID NO: 3959 - DNA, 20 bp, Artificial Sequence
  Description of Artificial Sequence: Synthetic oligonucleotide
cttggtccacgcctctagag

SEQ ID NO: 3960 - DNA, 20 bp, Artificial Sequence
  Description of Artificial Sequence: Synthetic oligonucleotide
ttggtccacgcctctagagt

SEQ ID NO: 3961 - DNA, 20 bp, Artificial Sequence
  Description of Artificial Sequence: Synthetic oligonucleotide
tggtccacgcctctagagtc

SEQ ID NO: 3962 - DNA, 20 bp, Artificial Sequence
  Description of Artificial Sequence: Synthetic oligonucleotide
ggtccacgcctctagagtct

SEQ ID NO: 3963 - DNA, 20 bp, Artificial Sequence
  Description of Artificial Sequence: Synthetic oligonucleotide
gtccacgcctctagagtctg

SEQ ID NO: 3964 - DNA, 20 bp, Artificial Sequence
  Description of Artificial Sequence: Synthetic oligonucleotide
tccacgcctctagagtctga

SEQ ID NO: 3965 - DNA, 20 bp, Artificial Sequence
  Description of Artificial Sequence: Synthetic oligonucleotide
ccacgcctctagagtctgag

SEQ ID NO: 3966 - DNA, 20 bp, Artificial Sequence
  Description of Artificial Sequence: Synthetic oligonucleotide
cacgcctctagagtctgagc

SEQ ID NO: 3967 - DNA, 20 bp, Artificial Sequence
  Description of Artificial Sequence: Synthetic oligonucleotide
acgcctctagagtctgagca

SEQ ID NO: 3968 - DNA, 20 bp, Artificial Sequence
  Description of Artificial Sequence: Synthetic oligonucleotide
cgcctctagagtctgagcat

SEQ ID NO: 3969 - DNA, 20 bp, Artificial Sequence
  Description of Artificial Sequence: Synthetic oligonucleotide
gcctctagagtctgagcata

SEQ ID NO: 3970 - DNA, 20 bp, Artificial Sequence
  Description of Artificial Sequence: Synthetic oligonucleotide
cctctagagtctgagcatat

SEQ ID NO: 3971 - DNA, 20 bp, Artificial Sequence
  Description of Artificial Sequence: Synthetic oligonucleotide
ctctagagtctgagcatatc

SEQ ID NO: 3972 - DNA, 20 bp, Artificial Sequence
  Description of Artificial Sequence: Synthetic oligonucleotide
tctagagtctgagcatatcc

SEQ ID NO: 3973 - DNA, 20 bp, Artificial Sequence
  Description of Artificial Sequence: Synthetic oligonucleotide
ctagagtctgagcatatcct

SEQ ID NO: 3974 - DNA, 20 bp, Artificial Sequence
  Description of Artificial Sequence: Synthetic oligonucleotide
tagagtctgagcatatcctg

SEQ ID NO: 3975 - DNA, 20 bp, Artificial Sequence
  Description of Artificial Sequence: Synthetic oligonucleotide
agagtctgagcatatcctgc

SEQ ID NO: 3976 - DNA, 20 bp, Artificial Sequence
  Description of Artificial Sequence: Synthetic oligonucleotide
gagtctgagcatatcctgca

SEQ ID NO: 3977 - DNA, 20 bp, Artificial Sequence
  Description of Artificial Sequence: Synthetic oligonucleotide
agtctgagcatatcctgcag

SEQ ID NO: 3978 - DNA, 20 bp, Artificial Sequence
  Description of Artificial Sequence: Synthetic oligonucleotide
gtctgagcatatcctgcagc

SEQ ID NO: 3979 - DNA, 20 bp, Artificial Sequence
  Description of Artificial Sequence: Synthetic oligonucleotide
tctgagcatatcctgcagcc

SEQ ID NO: 3980 - DNA, 20 bp, Artificial Sequence
  Description of Artificial Sequence: Synthetic oligonucleotide
ctgagcatatcctgcagcct

SEQ ID NO: 3981 - DNA, 20 bp, Artificial Sequence
  Description of Artificial Sequence: Synthetic oligonucleotide
tgagcatatcctgcagcctc

SEQ ID NO: 3982 - DNA, 20 bp, Artificial Sequence
  Description of Artificial Sequence: Synthetic oligonucleotide
gagcatatcctgcagcctcg

SEQ ID NO: 3983 - DNA, 20 bp, Artificial Sequence
  Description of Artificial Sequence: Synthetic oligonucleotide
agcatatcctgcagcctcga

SEQ ID NO: 3984 - DNA, 20 bp, Artificial Sequence
  Description of Artificial Sequence: Synthetic oligonucleotide
gcatatcctgcagcctcgat

SEQ ID NO: 3985 - DNA, 20 bp, Artificial Sequence
  Description of Artificial Sequence: Synthetic oligonucleotide
catatcctgcagcctcgatc

SEQ ID NO: 3986 - DNA, 20 bp, Artificial Sequence
  Description of Artificial Sequence: Synthetic oligonucleotide
atatcctgcagcctcgatct

SEQ ID NO: 3987 - DNA, 20 bp, Artificial Sequence
  Description of Artificial Sequence: Synthetic oligonucleotide
tatcctgcagcctcgatctc

SEQ ID NO: 3988 - DNA, 20 bp, Artificial Sequence
  Description of Artificial Sequence: Synthetic oligonucleotide
atcctgcagcctcgatctca

SEQ ID NO: 3989 - DNA, 20 bp, Artificial Sequence
  Description of Artificial Sequence: Synthetic oligonucleotide
tcctgcagcctcgatctcag

SEQ ID NO: 3990 - DNA, 20 bp, Artificial Sequence
  Description of Artificial Sequence: Synthetic oligonucleotide
cctgcagcctcgatctcagg

SEQ ID NO: 3991 - DNA, 20 bp, Artificial Sequence
  Description of Artificial Sequence: Synthetic oligonucleotide
ctgcagcctcgatctcagga

SEQ ID NO: 3992 - DNA, 20 bp, Artificial Sequence
  Description of Artificial Sequence: Synthetic oligonucleotide
tgcagcctcgatctcaggag

SEQ ID NO: 3993 - DNA, 20 bp, Artificial Sequence
  Description of Artificial Sequence: Synthetic oligonucleotide
gcagcctcgatctcaggagg

SEQ ID NO: 3994 - DNA, 20 bp, Artificial Sequence
  Description of Artificial Sequence: Synthetic oligonucleotide
cagcctcgatctcaggaggc

SEQ ID NO: 3995 - DNA, 20 bp, Artificial Sequence
  Description of Artificial Sequence: Synthetic oligonucleotide
agcctcgatctcaggaggca

SEQ ID NO: 3996 - DNA, 20 bp, Artificial Sequence
  Description of Artificial Sequence: Synthetic oligonucleotide
gcctcgatctcaggaggcaa

SEQ ID NO: 3997 - DNA, 20 bp, Artificial Sequence
  Description of Artificial Sequence: Synthetic oligonucleotide
cctcgatctcaggaggcaac

SEQ ID NO: 3998 - DNA, 20 bp, Artificial Sequence
  Description of Artificial Sequence: Synthetic oligonucleotide
ctcgatctcaggaggcaacg

SEQ ID NO: 3999 - DNA, 20 bp, Artificial Sequence
  Description of Artificial Sequence: Synthetic oligonucleotide
tcgatctcaggaggcaacgc

SEQ ID NO: 4000 - DNA, 20 bp, Artificial Sequence
  Description of Artificial Sequence: Synthetic oligonucleotide
cgatctcaggaggcaacgca

SEQ ID NO: 4001 - DNA, 20 bp, Artificial Sequence
  Description of Artificial Sequence: Synthetic oligonucleotide
gatctcaggaggcaacgcat

SEQ ID NO: 4002 - DNA, 20 bp, Artificial Sequence
  Description of Artificial Sequence: Synthetic oligonucleotide
atctcaggaggcaacgcatg

SEQ ID NO: 4003 - DNA, 20 bp, Artificial Sequence
  Description of Artificial Sequence: Synthetic oligonucleotide
tctcaggaggcaacgcatgc

SEQ ID NO: 4004 - DNA, 20 bp, Artificial Sequence
  Description of Artificial Sequence: Synthetic oligonucleotide
ctcaggaggcaacgcatgca

SEQ ID NO: 4005 - DNA, 20 bp, Artificial Sequence
  Description of Artificial Sequence: Synthetic oligonucleotide
tcaggaggcaacgcatgcag

SEQ ID NO: 4006 - DNA, 20 bp, Artificial Sequence
  Description of Artificial Sequence: Synthetic oligonucleotide
caggaggcaacgcatgcagc

SEQ ID NO: 4007 - DNA, 20 bp, Artificial Sequence
  Description of Artificial Sequence: Synthetic oligonucleotide
aggaggcaacgcatgcagcc

SEQ ID NO: 4008 - DNA, 20 bp, Artificial Sequence
  Description of Artificial Sequence: Synthetic oligonucleotide
ggaggcaacgcatgcagccc

SEQ ID NO: 4009 - DNA, 20 bp, Artificial Sequence
  Description of Artificial Sequence: Synthetic oligonucleotide
gaggcaacgcatgcagcccc

SEQ ID NO: 4010 - DNA, 20 bp, Artificial Sequence
  Description of Artificial Sequence: Synthetic oligonucleotide
aggcaacgcatgcagccccc

SEQ ID NO: 4011 - DNA, 20 bp, Artificial Sequence
  Description of Artificial Sequence: Synthetic oligonucleotide
ggcaacgcatgcagcccccc

SEQ ID NO: 4012 - DNA, 20 bp, Artificial Sequence
  Description of Artificial Sequence: Synthetic oligonucleotide
gcaacgcatgcagcccccct

SEQ ID NO: 4013 - DNA, 20 bp, Artificial Sequence
  Description of Artificial Sequence: Synthetic oligonucleotide
caacgcatgcagcccccctg

SEQ ID NO: 4014 - DNA, 20 bp, Artificial Sequence
  Description of Artificial Sequence: Synthetic oligonucleotide
aacgcatgcagcccccctgc

SEQ ID NO: 4015 - DNA, 20 bp, Artificial Sequence
  Description of Artificial Sequence: Synthetic oligonucleotide
acgcatgcagcccccctgca

SEQ ID NO: 4016 - DNA, 20 bp, Artificial Sequence
  Description of Artificial Sequence: Synthetic oligonucleotide
cgcatgcagcccccctgcac

SEQ ID NO: 4017 - DNA, 20 bp, Artificial Sequence
  Description of Artificial Sequence: Synthetic oligonucleotide
gcatgcagcccccctgcact

SEQ ID NO: 4018 - DNA, 20 bp, Artificial Sequence
  Description of Artificial Sequence: Synthetic oligonucleotide
catgcagcccccctgcactc

SEQ ID NO: 4019 - DNA, 20 bp, Artificial Sequence
  Description of Artificial Sequence: Synthetic oligonucleotide
atgcagcccccctgcactca

SEQ ID NO: 4020 - DNA, 20 bp, Artificial Sequence
  Description of Artificial Sequence: Synthetic oligonucleotide
tgcagcccccctgcactcag

SEQ ID NO: 4021 - DNA, 20 bp, Artificial Sequence
  Description of Artificial Sequence: Synthetic oligonucleotide
gcagcccccctgcactcaga

SEQ ID NO: 4022 - DNA, 20 bp, Artificial Sequence
  Description of Artificial Sequence: Synthetic oligonucleotide
cagcccccctgcactcagaa

SEQ ID NO: 4023 - DNA, 20 bp, Artificial Sequence
  Description of Artificial Sequence: Synthetic oligonucleotide
agcccccctgcactcagaaa

SEQ ID NO: 4024 - DNA, 20 bp, Artificial Sequence
  Description of Artificial Sequence: Synthetic oligonucleotide
gcccccctgcactcagaaag

SEQ ID NO: 4025 - DNA, 20 bp, Artificial Sequence
  Description of Artificial Sequence: Synthetic oligonucleotide
cccccctgcactcagaaagg

SEQ ID NO: 4026 - DNA, 20 bp, Artificial Sequence
  Description of Artificial Sequence: Synthetic oligonucleotide
ccccctgcactcagaaaggg

SEQ ID NO: 4027 - DNA, 20 bp, Artificial Sequence
  Description of Artificial Sequence: Synthetic oligonucleotide
cccctgcactcagaaagggg

SEQ ID NO: 4028 - DNA, 20 bp, Artificial Sequence
  Description of Artificial Sequence: Synthetic oligonucleotide
ccctgcactcagaaaggggg

SEQ ID NO: 4029 - DNA, 20 bp, Artificial Sequence
  Description of Artificial Sequence: Synthetic oligonucleotide
cctgcactcagaaagggggc

SEQ ID NO: 4030 - DNA, 20 bp, Artificial Sequence
  Description of Artificial Sequence: Synthetic oligonucleotide
ctgcactcagaaagggggct

SEQ ID NO: 4031 - DNA, 20 bp, Artificial Sequence
  Description of Artificial Sequence: Synthetic oligonucleotide
tgcactcagaaagggggctt

SEQ ID NO: 4032 - DNA, 20 bp, Artificial Sequence
  Description of Artificial Sequence: Synthetic oligonucleotide
gcactcagaaagggggcttc

SEQ ID NO: 4033 - DNA, 20 bp, Artificial Sequence
  Description of Artificial Sequence: Synthetic oligonucleotide
cactcagaaagggggcttct

SEQ ID NO: 4034 - DNA, 20 bp, Artificial Sequence
  Description of Artificial Sequence: Synthetic oligonucleotide
actcagaaagggggcttctc

SEQ ID NO: 4035 - DNA, 20 bp, Artificial Sequence
  Description of Artificial Sequence: Synthetic oligonucleotide
ctcagaaagggggcttctcc

SEQ ID NO: 4036 - DNA, 20 bp, Artificial Sequence
  Description of Artificial Sequence: Synthetic oligonucleotide
tcagaaagggggcttctcca

SEQ ID NO: 4037 - DNA, 20 bp, Artificial Sequence
  Description of Artificial Sequence: Synthetic oligonucleotide
cagaaagggggcttctccag

SEQ ID NO: 4038 - DNA, 20 bp, Artificial Sequence
  Description of Artificial Sequence: Synthetic oligonucleotide
agaaagggggcttctccagt

SEQ ID NO: 4039 - DNA, 20 bp, Artificial Sequence
  Description of Artificial Sequence: Synthetic oligonucleotide
gaaagggggcttctccagtc

SEQ ID NO: 4040 - DNA, 20 bp, Artificial Sequence
  Description of Artificial Sequence: Synthetic oligonucleotide
aaagggggcttctccagtcg

SEQ ID NO: 4041 - DNA, 20 bp, Artificial Sequence
  Description of Artificial Sequence: Synthetic oligonucleotide
aagggggcttctccagtcgt

SEQ ID NO: 4042 - DNA, 20 bp, Artificial Sequence
  Description of Artificial Sequence: Synthetic oligonucleotide
agggggcttctccagtcgtg

SEQ ID NO: 4043 - DNA, 20 bp, Artificial Sequence
  Description of Artificial Sequence: Synthetic oligonucleotide
gggggcttctccagtcgtgg

SEQ ID NO: 4044 - DNA, 20 bp, Artificial Sequence
  Description of Artificial Sequence: Synthetic oligonucleotide
ggggcttctccagtcgtggt

SEQ ID NO: 4045 - DNA, 20 bp, Artificial Sequence
  Description of Artificial Sequence: Synthetic oligonucleotide
gggcttctccagtcgtggtc

SEQ ID NO: 4046 - DNA, 20 bp, Artificial Sequence
  Description of Artificial Sequence: Synthetic oligonucleotide
ggcttctccagtcgtggtct

SEQ ID NO: 4047 - DNA, 20 bp, Artificial Sequence
  Description of Artificial Sequence: Synthetic oligonucleotide
gcttctccagtcgtggtctt

SEQ ID NO: 4048 - DNA, 20 bp, Artificial Sequence
  Description of Artificial Sequence: Synthetic oligonucleotide
cttctccagtcgtggtcttc

SEQ ID NO: 4049 - DNA, 20 bp, Artificial Sequence
  Description of Artificial Sequence: Synthetic oligonucleotide
ttctccagtcgtggtcttct

SEQ ID NO: 4050 - DNA, 20 bp, Artificial Sequence
  Description of Artificial Sequence: Synthetic oligonucleotide
tctccagtcgtggtcttctt

SEQ ID NO: 4051 - DNA, 20 bp, Artificial Sequence
  Description of Artificial Sequence: Synthetic oligonucleotide
ctccagtcgtggtcttcttc

SEQ ID NO: 4052 - DNA, 20 bp, Artificial Sequence
  Description of Artificial Sequence: Synthetic oligonucleotide
tccagtcgtggtcttcttct

SEQ ID NO: 4053 - DNA, 20 bp, Artificial Sequence
  Description of Artificial Sequence: Synthetic oligonucleotide
ccagtcgtggtcttcttctc

SEQ ID NO: 4054 - DNA, 20 bp, Artificial Sequence
  Description of Artificial Sequence: Synthetic oligonucleotide
cagtcgtggtcttcttctct

SEQ ID NO: 4055 - DNA, 20 bp, Artificial Sequence
  Description of Artificial Sequence: Synthetic oligonucleotide
agtcgtggtcttcttctctg

SEQ ID NO: 4056 - DNA, 20 bp, Artificial Sequence
  Description of Artificial Sequence: Synthetic oligonucleotide
gtcgtggtcttcttctctgt

SEQ ID NO: 4057 - DNA, 20 bp, Artificial Sequence
  Description of Artificial Sequence: Synthetic oligonucleotide
tcgtggtcttcttctctgtc

SEQ ID NO: 4058 - DNA, 20 bp, Artificial Sequence
  Description of Artificial Sequence: Synthetic oligonucleotide
cgtggtcttcttctctgtcc

SEQ ID NO: 4059 - DNA, 20 bp, Artificial Sequence
  Description of Artificial Sequence: Synthetic oligonucleotide
gtggtcttcttctctgtcca

SEQ ID NO: 4060 - DNA, 20 bp, Artificial Sequence
  Description of Artificial Sequence: Synthetic oligonucleotide
tggtcttcttctctgtccac

SEQ ID NO: 4061 - DNA, 20 bp, Artificial Sequence
  Description of Artificial Sequence: Synthetic oligonucleotide
ggtcttcttctctgtccaca

SEQ ID NO: 4062 - DNA, 20 bp, Artificial Sequence
  Description of Artificial Sequence: Synthetic oligonucleotide
gtcttcttctctgtccacaa

SEQ ID NO: 4063 - DNA, 20 bp, Artificial Sequence
  Description of Artificial Sequence: Synthetic oligonucleotide
tcttcttctctgtccacaag

SEQ ID NO: 4064 - DNA, 20 bp, Artificial Sequence
  Description of Artificial Sequence: Synthetic oligonucleotide
cttcttctctgtccacaagt

SEQ ID NO: 4065 - DNA, 20 bp, Artificial Sequence
  Description of Artificial Sequence: Synthetic oligonucleotide
ttcttctctgtccacaagtt

SEQ ID NO: 4066 - DNA, 20 bp, Artificial Sequence
  Description of Artificial Sequence: Synthetic oligonucleotide
tcttctctgtccacaagttt

SEQ ID NO: 4067 - DNA, 20 bp, Artificial Sequence
  Description of Artificial Sequence: Synthetic oligonucleotide
cttctctgtccacaagtttc

SEQ ID NO: 4068 - DNA, 20 bp, Artificial Sequence
  Description of Artificial Sequence: Synthetic oligonucleotide
ttctctgtccacaagtttcc

SEQ ID NO: 4069 - DNA, 20 bp, Artificial Sequence
  Description of Artificial Sequence: Synthetic oligonucleotide
tctctgtccacaagtttcca

SEQ ID NO: 4070 - DNA, 20 bp, Artificial Sequence
  Description of Artificial Sequence: Synthetic oligonucleotide
ctctgtccacaagtttccag

SEQ ID NO: 4071 - DNA, 20 bp, Artificial Sequence
  Description of Artificial Sequence: Synthetic oligonucleotide
tctgtccacaagtttccaga

SEQ ID NO: 4072 - DNA, 20 bp, Artificial Sequence
  Description of Artificial Sequence: Synthetic oligonucleotide
ctgtccacaagtttccagat

SEQ ID NO: 4073 - DNA, 20 bp, Artificial Sequence
  Description of Artificial Sequence: Synthetic oligonucleotide
tgtccacaagtttccagatg

SEQ ID NO: 4074 - DNA, 20 bp, Artificial Sequence
  Description of Artificial Sequence: Synthetic oligonucleotide
gtccacaagtttccagatgg

SEQ ID NO: 4075 - DNA, 20 bp, Artificial Sequence
  Description of Artificial Sequence: Synthetic oligonucleotide
tccacaagtttccagatggc

SEQ ID NO: 4076 - DNA, 20 bp, Artificial Sequence
  Description of Artificial Sequence: Synthetic oligonucleotide
ccacaagtttccagatggcc

SEQ ID NO: 4077 - DNA, 20 bp, Artificial Sequence
  Description of Artificial Sequence: Synthetic oligonucleotide
cacaagtttccagatggccc

SEQ ID NO: 4078 - DNA, 20 bp, Artificial Sequence
  Description of Artificial Sequence: Synthetic oligonucleotide
acaagtttccagatggcccc

SEQ ID NO: 4079 - DNA, 20 bp, Artificial Sequence
  Description of Artificial Sequence: Synthetic oligonucleotide
caagtttccagatggcccct

SEQ ID NO: 4080 - DNA, 20 bp, Artificial Sequence
  Description of Artificial Sequence: Synthetic oligonucleotide
aagtttccagatggcccctc

SEQ ID NO: 4081 - DNA, 20 bp, Artificial Sequence
  Description of Artificial Sequence: Synthetic oligonucleotide
agtttccagatggcccctcc

SEQ ID NO: 4082 - DNA, 20 bp, Artificial Sequence
  Description of Artificial Sequence: Synthetic oligonucleotide
gtttccagatggcccctcct

SEQ ID NO: 4083 - DNA, 20 bp, Artificial Sequence
  Description of Artificial Sequence: Synthetic oligonucleotide
tttccagatggcccctcctt

SEQ ID NO: 4084 - DNA, 20 bp, Artificial Sequence
  Description of Artificial Sequence: Synthetic oligonucleotide
ttccagatggcccctccttg

SEQ ID NO: 4085 - DNA, 20 bp, Artificial Sequence
  Description of Artificial Sequence: Synthetic oligonucleotide
tccagatggcccctccttgg

SEQ ID NO: 4086 - DNA, 20 bp, Artificial Sequence
  Description of Artificial Sequence: Synthetic oligonucleotide
ccagatggcccctccttgga

SEQ ID NO: 4087 - DNA, 20 bp, Artificial Sequence
  Description of Artificial Sequence: Synthetic oligonucleotide
cagatggcccctccttggag

SEQ ID NO: 4088 - DNA, 20 bp, Artificial Sequence
  Description of Artificial Sequence: Synthetic oligonucleotide
agatggcccctccttggagc

SEQ ID NO: 4089 - DNA, 20 bp, Artificial Sequence
  Description of Artificial Sequence: Synthetic oligonucleotide
gatggcccctccttggagcc

SEQ ID NO: 4090 - DNA, 20 bp, Artificial Sequence
  Description of Artificial Sequence: Synthetic oligonucleotide
atggcccctccttggagccc

SEQ ID NO: 4091 - DNA, 20 bp, Artificial Sequence
  Description of Artificial Sequence: Synthetic oligonucleotide
tggcccctccttggagcccc

SEQ ID NO: 4092 - DNA, 20 bp, Artificial Sequence
  Description of Artificial Sequence: Synthetic oligonucleotide
ggcccctccttggagcccct

SEQ ID NO: 4093 - DNA, 20 bp, Artificial Sequence
  Description of Artificial Sequence: Synthetic oligonucleotide
gcccctccttggagcccctg

SEQ ID NO: 4094 - DNA, 20 bp, Artificial Sequence
  Description of Artificial Sequence: Synthetic oligonucleotide
cccctccttggagcccctgc

SEQ ID NO: 4095 - DNA, 20 bp, Artificial Sequence
  Description of Artificial Sequence: Synthetic oligonucleotide
ccctccttggagcccctgcc

SEQ ID NO: 4096 - DNA, 20 bp, Artificial Sequence
  Description of Artificial Sequence: Synthetic oligonucleotide
cctccttggagcccctgccc

SEQ ID NO: 4097 - DNA, 20 bp, Artificial Sequence
  Description of Artificial Sequence: Synthetic oligonucleotide
ctccttggagcccctgccca

SEQ ID NO: 4098 - DNA, 20 bp, Artificial Sequence
  Description of Artificial Sequence: Synthetic oligonucleotide
tccttggagcccctgcccag

SEQ ID NO: 4099 - DNA, 20 bp, Artificial Sequence
  Description of Artificial Sequence: Synthetic oligonucleotide
ccttggagcccctgcccagg

SEQ ID NO: 4100 - DNA, 20 bp, Artificial Sequence
  Description of Artificial Sequence: Synthetic oligonucleotide
cttggagcccctgcccaggc

SEQ ID NO: 4101 - DNA, 20 bp, Artificial Sequence
  Description of Artificial Sequence: Synthetic oligonucleotide
ttggagcccctgcccaggca

SEQ ID NO: 4102 - DNA, 20 bp, Artificial Sequence
  Description of Artificial Sequence: Synthetic oligonucleotide
tggagcccctgcccaggcag

SEQ ID NO: 4103 - DNA, 20 bp, Artificial Sequence
  Description of Artificial Sequence: Synthetic oligonucleotide
ggagcccctgcccaggcagg

SEQ ID NO: 4104 - DNA, 20 bp, Artificial Sequence
  Description of Artificial Sequence: Synthetic oligonucleotide
gagcccctgcccaggcaggg

SEQ ID NO: 4105 - DNA, 20 bp, Artificial Sequence
  Description of Artificial Sequence: Synthetic oligonucleotide
agcccctgcccaggcaggga

SEQ ID NO: 4106 - DNA, 20 bp, Artificial Sequence
  Description of Artificial Sequence: Synthetic oligonucleotide
gcccctgcccaggcagggaa

SEQ ID NO: 4107 - DNA, 20 bp, Artificial Sequence
  Description of Artificial Sequence: Synthetic oligonucleotide
cccctgcccaggcagggaac

SEQ ID NO: 4108 - DNA, 20 bp, Artificial Sequence
  Description of Artificial Sequence: Synthetic oligonucleotide
ccctgcccaggcagggaacg

SEQ ID NO: 4109 - DNA, 20 bp, Artificial Sequence
  Description of Artificial Sequence: Synthetic oligonucleotide
cctgcccaggcagggaacgg

SEQ ID NO: 4110 - DNA, 20 bp, Artificial Sequence
  Description of Artificial Sequence: Synthetic oligonucleotide
ctgcccaggcagggaacggc

SEQ ID NO: 4111 - DNA, 20 bp, Artificial Sequence
  Description of Artificial Sequence: Synthetic oligonucleotide
tgcccaggcagggaacggcc

SEQ ID NO: 4112 - DNA, 20 bp, Artificial Sequence
  Description of Artificial Sequence: Synthetic oligonucleotide
gcccaggcagggaacggcca

SEQ ID NO: 4113 - DNA, 20 bp, Artificial Sequence
  Description of Artificial Sequence: Synthetic oligonucleotide
cccaggcagggaacggccac

SEQ ID NO: 4114 - DNA, 20 bp, Artificial Sequence
  Description of Artificial Sequence: Synthetic oligonucleotide
ccaggcagggaacggccaca

SEQ ID NO: 4115 - DNA, 20 bp, Artificial Sequence
  Description of Artificial Sequence: Synthetic oligonucleotide
caggcagggaacggccacat

SEQ ID NO: 4116 - DNA, 20 bp, Artificial Sequence
  Description of Artificial Sequence: Synthetic oligonucleotide
aggcagggaacggccacatc

SEQ ID NO: 4117 - DNA, 20 bp, Artificial Sequence
  Description of Artificial Sequence: Synthetic oligonucleotide
ggcagggaacggccacatcc

SEQ ID NO: 4118 - DNA, 20 bp, Artificial Sequence
  Description of Artificial Sequence: Synthetic oligonucleotide
gcagggaacggccacatcct

SEQ ID NO: 4119 - DNA, 20 bp, Artificial Sequence
  Description of Artificial Sequence: Synthetic oligonucleotide
cagggaacggccacatcctc

SEQ ID NO: 4120 - DNA, 20 bp, Artificial Sequence
  Description of Artificial Sequence: Synthetic oligonucleotide
agggaacggccacatcctcg

SEQ ID NO: 4121 - DNA, 20 bp, Artificial Sequence
  Description of Artificial Sequence: Synthetic oligonucleotide
gggaacggccacatcctcgg

SEQ ID NO: 4122 - DNA, 20 bp, Artificial Sequence
  Description of Artificial Sequence: Synthetic oligonucleotide
ggaacggccacatcctcggg

SEQ ID NO: 4123 - DNA, 20 bp, Artificial Sequence
  Description of Artificial Sequence: Synthetic oligonucleotide
gaacggccacatcctcgggc

SEQ ID NO: 4124 - DNA, 20 bp, Artificial Sequence
  Description of Artificial Sequence: Synthetic oligonucleotide
aacggccacatcctcgggca

SEQ ID NO: 4125 - DNA, 20 bp, Artificial Sequence
  Description of Artificial Sequence: Synthetic oligonucleotide
acggccacatcctcgggcag

SEQ ID NO: 4126 - DNA, 20 bp, Artificial Sequence
  Description of Artificial Sequence: Synthetic oligonucleotide
cggccacatcctcgggcaga

SEQ ID NO: 4127 - DNA, 20 bp, Artificial Sequence
  Description of Artificial Sequence: Synthetic oligonucleotide
ggccacatcctcgggcagag

SEQ ID NO: 4128 - DNA, 20 bp, Artificial Sequence
  Description of Artificial Sequence: Synthetic oligonucleotide
gccacatcctcgggcagagc

SEQ ID NO: 4129 - DNA, 20 bp, Artificial Sequence
  Description of Artificial Sequence: Synthetic oligonucleotide
ccacatcctcgggcagagcc

SEQ ID NO: 4130 - DNA, 20 bp, Artificial Sequence
  Description of Artificial Sequence: Synthetic oligonucleotide
cacatcctcgggcagagcca

SEQ ID NO: 4131 - DNA, 20 bp, Artificial Sequence
  Description of Artificial Sequence: Synthetic oligonucleotide
acatcctcgggcagagccaa

SEQ ID NO: 4132 - DNA, 20 bp, Artificial Sequence
  Description of Artificial Sequence: Synthetic oligonucleotide
catcctcgggcagagccaag

SEQ ID NO: 4133 - DNA, 20 bp, Artificial Sequence
  Description of Artificial Sequence: Synthetic oligonucleotide
atcctcgggcagagccaaga

SEQ ID NO: 4134 - DNA, 20 bp, Artificial Sequence
  Description of Artificial Sequence: Synthetic oligonucleotide
tcctcgggcagagccaagag

SEQ ID NO: 4135 - DNA, 20 bp, Artificial Sequence
  Description of Artificial Sequence: Synthetic oligonucleotide
cctcgggcagagccaagagt

SEQ ID NO: 4136 - DNA, 20 bp, Artificial Sequence
  Description of Artificial Sequence: Synthetic oligonucleotide
ctcgggcagagccaagagtc

SEQ ID NO: 4137 - DNA, 20 bp, Artificial Sequence
  Description of Artificial Sequence: Synthetic oligonucleotide
tcgggcagagccaagagtca

SEQ ID NO: 4138 - DNA, 20 bp, Artificial Sequence
  Description of Artificial Sequence: Synthetic oligonucleotide
cgggcagagccaagagtcac

SEQ ID NO: 4139 - DNA, 20 bp, Artificial Sequence
  Description of Artificial Sequence: Synthetic oligonucleotide
gggcagagccaagagtcacc

SEQ ID NO: 4140 - DNA, 20 bp, Artificial Sequence
  Description of Artificial Sequence: Synthetic oligonucleotide
ggcagagccaagagtcaccg

SEQ ID NO: 4141 - DNA, 20 bp, Artificial Sequence
  Description of Artificial Sequence: Synthetic oligonucleotide
gcagagccaagagtcaccgt

SEQ ID NO: 4142 - DNA, 20 bp, Artificial Sequence
  Description of Artificial Sequence: Synthetic oligonucleotide
cagagccaagagtcaccgtc

SEQ ID NO: 4143 - DNA, 20 bp, Artificial Sequence
  Description of Artificial Sequence: Synthetic oligonucleotide
agagccaagagtcaccgtct

SEQ ID NO: 4144 - DNA, 20 bp, Artificial Sequence
  Description of Artificial Sequence: Synthetic oligonucleotide
gagccaagagtcaccgtctt

SEQ ID NO: 4145 - DNA, 20 bp, Artificial Sequence
  Description of Artificial Sequence: Synthetic oligonucleotide
agccaagagtcaccgtcttt

SEQ ID NO: 4146 - DNA, 20 bp, Artificial Sequence
  Description of Artificial Sequence: Synthetic oligonucleotide
gccaagagtcaccgtctttc

SEQ ID NO: 4147 - DNA, 20 bp, Artificial Sequence
  Description of Artificial Sequence: Synthetic oligonucleotide
ccaagagtcaccgtctttcg

SEQ ID NO: 4148 - DNA, 20 bp, Artificial Sequence
  Description of Artificial Sequence: Synthetic oligonucleotide
caagagtcaccgtctttcgt

SEQ ID NO: 4149 - DNA, 20 bp, Artificial Sequence
  Description of Artificial Sequence: Synthetic oligonucleotide
aagagtcaccgtctttcgtg

SEQ ID NO: 4150 - DNA, 20 bp, Artificial Sequence
  Description of Artificial Sequence: Synthetic oligonucleotide
agagtcaccgtctttcgtgg

SEQ ID NO: 4151 - DNA, 20 bp, Artificial Sequence
  Description of Artificial Sequence: Synthetic oligonucleotide
gagtcaccgtctttcgtggg

SEQ ID NO: 4152 - DNA, 20 bp, Artificial Sequence
  Description of Artificial Sequence: Synthetic oligonucleotide
agtcaccgtctttcgtgggc

SEQ ID NO: 4153 - DNA, 20 bp, Artificial Sequence
  Description of Artificial Sequence: Synthetic oligonucleotide
gtcaccgtctttcgtgggcc

SEQ ID NO: 4154 - DNA, 20 bp, Artificial Sequence
  Description of Artificial Sequence: Synthetic oligonucleotide
tcaccgtctttcgtgggcct

SEQ ID NO: 4155 - DNA, 20 bp, Artificial Sequence
  Description of Artificial Sequence: Synthetic oligonucleotide
caccgtctttcgtgggcctg

SEQ ID NO: 4156 - DNA, 20 bp, Artificial Sequence
  Description of Artificial Sequence: Synthetic oligonucleotide
accgtctttcgtgggcctgg

SEQ ID NO: 4157 - DNA, 20 bp, Artificial Sequence
  Description of Artificial Sequence: Synthetic oligonucleotide
ccgtctttcgtgggcctggg

SEQ ID NO: 4158 - DNA, 20 bp, Artificial Sequence
  Description of Artificial Sequence: Synthetic oligonucleotide
cgtctttcgtgggcctggga

SEQ ID NO: 4159 - DNA, 20 bp, Artificial Sequence
  Description of Artificial Sequence: Synthetic oligonucleotide
gtctttcgtgggcctgggac

SEQ ID NO: 4160 - DNA, 20 bp, Artificial Sequence
  Description of Artificial Sequence: Synthetic oligonucleotide
tctttcgtgggcctgggacc

SEQ ID NO: 4161 - DNA, 20 bp, Artificial Sequence
  Description of Artificial Sequence: Synthetic oligonucleotide
ctttcgtgggcctgggacca

SEQ ID NO: 4162 - DNA, 20 bp, Artificial Sequence
  Description of Artificial Sequence: Synthetic oligonucleotide
tttcgtgggcctgggaccag

SEQ ID NO: 4163 - DNA, 20 bp, Artificial Sequence
  Description of Artificial Sequence: Synthetic oligonucleotide
ttcgtgggcctgggaccagg

SEQ ID NO: 4164 - DNA, 20 bp, Artificial Sequence
  Description of Artificial Sequence: Synthetic oligonucleotide
tcgtgggcctgggaccaggc

SEQ ID NO: 4165 - DNA, 20 bp, Artificial Sequence
  Description of Artificial Sequence: Synthetic oligonucleotide
cgtgggcctgggaccaggcc

SEQ ID NO: 4166 - DNA, 20 bp, Artificial Sequence
  Description of Artificial Sequence: Synthetic oligonucleotide
gtgggcctgggaccaggccc

SEQ ID NO: 4167 - DNA, 20 bp, Artificial Sequence
  Description of Artificial Sequence: Synthetic oligonucleotide
tgggcctgggaccaggccca

SEQ ID NO: 4168 - DNA, 20 bp, Artificial Sequence
  Description of Artificial Sequence: Synthetic oligonucleotide
gggcctgggaccaggcccag

SEQ ID NO: 4169 - DNA, 20 bp, Artificial Sequence
  Description of Artificial Sequence: Synthetic oligonucleotide
ggcctgggaccaggcccagc

SEQ ID NO: 4170 - DNA, 20 bp, Artificial Sequence
  Description of Artificial Sequence: Synthetic oligonucleotide
gcctgggaccaggcccagcc

SEQ ID NO: 4171 - DNA, 20 bp, Artificial Sequence
  Description of Artificial Sequence: Synthetic oligonucleotide
cctgggaccaggcccagcca

SEQ ID NO: 4172 - DNA, 20 bp, Artificial Sequence
  Description of Artificial Sequence: Synthetic oligonucleotide
ctgggaccaggcccagccag

SEQ ID NO: 4173 - DNA, 20 bp, Artificial Sequence
  Description of Artificial Sequence: Synthetic oligonucleotide
tgggaccaggcccagccagg

SEQ ID NO: 4174 - DNA, 20 bp, Artificial Sequence
  Description of Artificial Sequence: Synthetic oligonucleotide
gggaccaggcccagccagga

SEQ ID NO: 4175 - DNA, 20 bp, Artificial Sequence
  Description of Artificial Sequence: Synthetic oligonucleotide
ggaccaggcccagccaggac

SEQ ID NO: 4176 - DNA, 20 bp, Artificial Sequence
  Description of Artificial Sequence: Synthetic oligonucleotide
gaccaggcccagccaggacg

SEQ ID NO: 4177 - DNA, 20 bp, Artificial Sequence
  Description of Artificial Sequence: Synthetic oligonucleotide
accaggcccagccaggacgc

SEQ ID NO: 4178 - DNA, 20 bp, Artificial Sequence
  Description of Artificial Sequence: Synthetic oligonucleotide
ccaggcccagccaggacgct

SEQ ID NO: 4179 - DNA, 20 bp, Artificial Sequence
  Description of Artificial Sequence: Synthetic oligonucleotide
caggcccagccaggacgcta

SEQ ID NO: 4180 - DNA, 20 bp, Artificial Sequence
  Description of Artificial Sequence: Synthetic oligonucleotide
aggcccagccaggacgctag

SEQ ID NO: 4181 - DNA, 20 bp, Artificial Sequence
  Description of Artificial Sequence: Synthetic oligonucleotide
ggcccagccaggacgctagg

SEQ ID NO: 4182 - DNA, 20 bp, Artificial Sequence
  Description of Artificial Sequence: Synthetic oligonucleotide
gcccagccaggacgctagga

SEQ ID NO: 4183 - DNA, 20 bp, Artificial Sequence
  Description of Artificial Sequence: Synthetic oligonucleotide
cccagccaggacgctaggag

SEQ ID NO: 4184 - DNA, 20 bp, Artificial Sequence
  Description of Artificial Sequence: Synthetic oligonucleotide
ccagccaggacgctaggagg

SEQ ID NO: 4185 - DNA, 20 bp, Artificial Sequence
  Description of Artificial Sequence: Synthetic oligonucleotide
cagccaggacgctaggaggc

SEQ ID NO: 4186 - DNA, 20 bp, Artificial Sequence
  Description of Artificial Sequence: Synthetic oligonucleotide
agccaggacgctaggaggct

SEQ ID NO: 4187 - DNA, 20 bp, Artificial Sequence
  Description of Artificial Sequence: Synthetic oligonucleotide
gccaggacgctaggaggctg

SEQ ID NO: 4188 - DNA, 20 bp, Artificial Sequence
  Description of Artificial Sequence: Synthetic oligonucleotide
ccaggacgctaggaggctgc

SEQ ID NO: 4189 - DNA, 20 bp, Artificial Sequence
  Description of Artificial Sequence: Synthetic oligonucleotide
caggacgctaggaggctgcc

SEQ ID NO: 4190 - DNA, 20 bp, Artificial Sequence
  Description of Artificial Sequence: Synthetic oligonucleotide
aggacgctaggaggctgcct

SEQ ID NO: 4191 - DNA, 20 bp, Artificial Sequence
  Description of Artificial Sequence: Synthetic oligonucleotide
ggacgctaggaggctgcctc

SEQ ID NO: 4192 - DNA, 20 bp, Artificial Sequence
  Description of Artificial Sequence: Synthetic oligonucleotide
gacgctaggaggctgcctct

SEQ ID NO: 4193 - DNA, 20 bp, Artificial Sequence
  Description of Artificial Sequence: Synthetic oligonucleotide
acgctaggaggctgcctctg

SEQ ID NO: 4194 - DNA, 20 bp, Artificial Sequence
  Description of Artificial Sequence: Synthetic oligonucleotide
cgctaggaggctgcctctgc

SEQ ID NO: 4195 - DNA, 20 bp, Artificial Sequence
  Description of Artificial Sequence: Synthetic oligonucleotide
gctaggaggctgcctctgct

SEQ ID NO: 4196 - DNA, 20 bp, Artificial Sequence
  Description of Artificial Sequence: Synthetic oligonucleotide
ctaggaggctgcctctgctg

SEQ ID NO: 4197 - DNA, 20 bp, Artificial Sequence
  Description of Artificial Sequence: Synthetic oligonucleotide
taggaggctgcctctgctgc

SEQ ID NO: 4198 - DNA, 20 bp, Artificial Sequence
  Description of Artificial Sequence: Synthetic oligonucleotide
aggaggctgcctctgctgcc

SEQ ID NO: 4199 - DNA, 20 bp, Artificial Sequence
  Description of Artificial Sequence: Synthetic oligonucleotide
ggaggctgcctctgctgcca

SEQ ID NO: 4200 - DNA, 20 bp, Artificial Sequence
  Description of Artificial Sequence: Synthetic oligonucleotide
gaggctgcctctgctgccat

SEQ ID NO: 4201 - DNA, 20 bp, Artificial Sequence
  Description of Artificial Sequence: Synthetic oligonucleotide
aggctgcctctgctgccatg

SEQ ID NO: 4202 - DNA, 20 bp, Artificial Sequence
  Description of Artificial Sequence: Synthetic oligonucleotide
ggctgcctctgctgccatgg

SEQ ID NO: 4203 - DNA, 20 bp, Artificial Sequence
  Description of Artificial Sequence: Synthetic oligonucleotide
gctgcctctgctgccatggg

SEQ ID NO: 4204 - DNA, 20 bp, Artificial Sequence
  Description of Artificial Sequence: Synthetic oligonucleotide
ctgcctctgctgccatgggc

SEQ ID NO: 4205 - DNA, 20 bp, Artificial Sequence
  Description of Artificial Sequence: Synthetic oligonucleotide
tgcctctgctgccatgggct

SEQ ID NO: 4206 - DNA, 20 bp, Artificial Sequence
  Description of Artificial Sequence: Synthetic oligonucleotide
gcctctgctgccatgggctg

SEQ ID NO: 4207 - DNA, 20 bp, Artificial Sequence
  Description of Artificial Sequence: Synthetic oligonucleotide
cctctgctgccatgggctgg

SEQ ID NO: 4208 - DNA, 20 bp, Artificial Sequence
  Description of Artificial Sequence: Synthetic oligonucleotide
ctctgctgccatgggctgga

SEQ ID NO: 4209 - DNA, 20 bp, Artificial Sequence
  Description of Artificial Sequence: Synthetic oligonucleotide
tctgctgccatgggctggat

SEQ ID NO: 4210 - DNA, 20 bp, Artificial Sequence
  Description of Artificial Sequence: Synthetic oligonucleotide
ctgctgccatgggctggatc

SEQ ID NO: 4211 - DNA, 20 bp, Artificial Sequence
  Description of Artificial Sequence: Synthetic oligonucleotide
tgctgccatgggctggatca

SEQ ID NO: 4212 - DNA, 20 bp, Artificial Sequence
  Description of Artificial Sequence: Synthetic oligonucleotide
gctgccatgggctggatcaa

SEQ ID NO: 4213 - DNA, 20 bp, Artificial Sequence
  Description of Artificial Sequence: Synthetic oligonucleotide
ctgccatgggctggatcaac

SEQ ID NO: 4214 - DNA, 20 bp, Artificial Sequence
  Description of Artificial Sequence: Synthetic oligonucleotide
tgccatgggctggatcaaca

SEQ ID NO: 4215 - DNA, 20 bp, Artificial Sequence
  Description of Artificial Sequence: Synthetic oligonucleotide
gccatgggctggatcaacat

SEQ ID NO: 4216 - DNA, 20 bp, Artificial Sequence
  Description of Artificial Sequence: Synthetic oligonucleotide
ccatgggctggatcaacatg

SEQ ID NO: 4217 - DNA, 20 bp, Artificial Sequence
  Description of Artificial Sequence: Synthetic oligonucleotide
catgggctggatcaacatgg

SEQ ID NO: 4218 - DNA, 20 bp, Artificial Sequence
  Description of Artificial Sequence: Synthetic oligonucleotide
atgggctggatcaacatggt

SEQ ID NO: 4219 - DNA, 20 bp, Artificial Sequence
  Description of Artificial Sequence: Synthetic oligonucleotide
tgggctggatcaacatggtg

SEQ ID NO: 4220 - DNA, 20 bp, Artificial Sequence
  Description of Artificial Sequence: Synthetic oligonucleotide
gggctggatcaacatggtgg

SEQ ID NO: 4221 - DNA, 20 bp, Artificial Sequence
  Description of Artificial Sequence: Synthetic oligonucleotide
ggctggatcaacatggtggt

SEQ ID NO: 4222 - DNA, 20 bp, Artificial Sequence
  Description of Artificial Sequence: Synthetic oligonucleotide
gctggatcaacatggtggtg

SEQ ID NO: 4223 - DNA, 20 bp, Artificial Sequence
  Description of Artificial Sequence: Synthetic oligonucleotide
ctggatcaacatggtggtgg

SEQ ID NO: 4224 - DNA, 20 bp, Artificial Sequence
  Description of Artificial Sequence: Synthetic oligonucleotide
tggatcaacatggtggtggc

SEQ ID NO: 4225 - DNA, 20 bp, Artificial Sequence
  Description of Artificial Sequence: Synthetic oligonucleotide
ggatcaacatggtggtggcc

SEQ ID NO: 4226 - DNA, 20 bp, Artificial Sequence
  Description of Artificial Sequence: Synthetic oligonucleotide
gatcaacatggtggtggcct

SEQ ID NO: 4227 - DNA, 20 bp, Artificial Sequence
  Description of Artificial Sequence: Synthetic oligonucleotide
atcaacatggtggtggcctg

SEQ ID NO: 4228 - DNA, 20 bp, Artificial Sequence
  Description of Artificial Sequence: Synthetic oligonucleotide
tcaacatggtggtggcctgc

SEQ ID NO: 4229 - DNA, 20 bp, Artificial Sequence
  Description of Artificial Sequence: Synthetic oligonucleotide
caacatggtggtggcctgca

SEQ ID NO: 4230 - DNA, 20 bp, Artificial Sequence
  Description of Artificial Sequence: Synthetic oligonucleotide
aacatggtggtggcctgcag

SEQ ID NO: 4231 - DNA, 20 bp, Artificial Sequence
  Description of Artificial Sequence: Synthetic oligonucleotide
acatggtggtggcctgcagc

SEQ ID NO: 4232 - DNA, 20 bp, Artificial Sequence
  Description of Artificial Sequence: Synthetic oligonucleotide
catggtggtggcctgcagcg

SEQ ID NO: 4233 - DNA, 20 bp, Artificial Sequence
  Description of Artificial Sequence: Synthetic oligonucleotide
atggtggtggcctgcagcgg

SEQ ID NO: 4234 - DNA, 20 bp, Artificial Sequence
  Description of Artificial Sequence: Synthetic oligonucleotide
tggtggtggcctgcagcggg

SEQ ID NO: 4235 - DNA, 20 bp, Artificial Sequence
  Description of Artificial Sequence: Synthetic oligonucleotide
ggtggtggcctgcagcgggt

SEQ ID NO: 4236 - DNA, 20 bp, Artificial Sequence
  Description of Artificial Sequence: Synthetic oligonucleotide
gtggtggcctgcagcgggta

SEQ ID NO: 4237 - DNA, 20 bp, Artificial Sequence
  Description of Artificial Sequence: Synthetic oligonucleotide
tggtggcctgcagcgggtag

SEQ ID NO: 4238 - DNA, 20 bp, Artificial Sequence
  Description of Artificial Sequence: Synthetic oligonucleotide
ggtggcctgcagcgggtagt

SEQ ID NO: 4239 - DNA, 20 bp, Artificial Sequence
  Description of Artificial Sequence: Synthetic oligonucleotide
gtggcctgcagcgggtagta

SEQ ID NO: 4240 - DNA, 20 bp, Artificial Sequence
  Description of Artificial Sequence: Synthetic oligonucleotide
tggcctgcagcgggtagtag

SEQ ID NO: 4241 - DNA, 20 bp, Artificial Sequence
  Description of Artificial Sequence: Synthetic oligonucleotide
ggcctgcagcgggtagtagc

SEQ ID NO: 4242 - DNA, 20 bp, Artificial Sequence
  Description of Artificial Sequence: Synthetic oligonucleotide
gcctgcagcgggtagtagcg

SEQ ID NO: 4243 - DNA, 20 bp, Artificial Sequence
  Description of Artificial Sequence: Synthetic oligonucleotide
cctgcagcgggtagtagcgg

SEQ ID NO: 4244 - DNA, 20 bp, Artificial Sequence
  Description of Artificial Sequence: Synthetic oligonucleotide
ctgcagcgggtagtagcggc

SEQ ID NO: 4245 - DNA, 20 bp, Artificial Sequence
  Description of Artificial Sequence: Synthetic oligonucleotide
tgcagcgggtagtagcggcc

SEQ ID NO: 4246 - DNA, 20 bp, Artificial Sequence
  Description of Artificial Sequence: Synthetic oligonucleotide
gcagcgggtagtagcggccc

SEQ ID NO: 4247 - DNA, 20 bp, Artificial Sequence
  Description of Artificial Sequence: Synthetic oligonucleotide
cagcgggtagtagcggcccc

SEQ ID NO: 4248 - DNA, 20 bp, Artificial Sequence
  Description of Artificial Sequence: Synthetic oligonucleotide
agcgggtagtagcggccccg

SEQ ID NO: 4249 - DNA, 20 bp, Artificial Sequence
  Description of Artificial Sequence: Synthetic oligonucleotide
gcgggtagtagcggccccgc

SEQ ID NO: 4250 - DNA, 20 bp, Artificial Sequence
  Description of Artificial Sequence: Synthetic oligonucleotide
cgggtagtagcggccccgcc

SEQ ID NO: 4251 - DNA, 20 bp, Artificial Sequence
  Description of Artificial Sequence: Synthetic oligonucleotide
gggtagtagcggccccgcca

SEQ ID NO: 4252 - DNA, 20 bp, Artificial Sequence
  Description of Artificial Sequence: Synthetic oligonucleotide
ggtagtagcggccccgccag

SEQ ID NO: 4253 - DNA, 20 bp, Artificial Sequence
  Description of Artificial Sequence: Synthetic oligonucleotide
gtagtagcggccccgccagg

SEQ ID NO: 4254 - DNA, 20 bp, Artificial Sequence
  Description of Artificial Sequence: Synthetic oligonucleotide
tagtagcggccccgccaggt

SEQ ID NO: 4255 - DNA, 20 bp, Artificial Sequence
  Description of Artificial Sequence: Synthetic oligonucleotide
agtagcggccccgccaggtc

SEQ ID NO: 4256 - DNA, 20 bp, Artificial Sequence
  Description of Artificial Sequence: Synthetic oligonucleotide
gtagcggccccgccaggtct

SEQ ID NO: 4257 - DNA, 20 bp, Artificial Sequence
  Description of Artificial Sequence: Synthetic oligonucleotide
tagcggccccgccaggtctt

SEQ ID NO: 4258 - DNA, 20 bp, Artificial Sequence
  Description of Artificial Sequence: Synthetic oligonucleotide
agcggccccgccaggtcttc

SEQ ID NO: 4259 - DNA, 20 bp, Artificial Sequence
  Description of Artificial Sequence: Synthetic oligonucleotide
gcggccccgccaggtcttcc

SEQ ID NO: 4260 - DNA, 20 bp, Artificial Sequence
  Description of Artificial Sequence: Synthetic oligonucleotide
cggccccgccaggtcttcca

SEQ ID NO: 4261 - DNA, 20 bp, Artificial Sequence
  Description of Artificial Sequence: Synthetic oligonucleotide
ggccccgccaggtcttccag

SEQ ID NO: 4262 - DNA, 20 bp, Artificial Sequence
  Description of Artificial Sequence: Synthetic oligonucleotide
gccccgccaggtcttccaga

SEQ ID NO: 4263 - DNA, 20 bp, Artificial Sequence
  Description of Artificial Sequence: Synthetic oligonucleotide
ccccgccaggtcttccagaa

SEQ ID NO: 4264 - DNA, 20 bp, Artificial Sequence
  Description of Artificial Sequence: Synthetic oligonucleotide
cccgccaggtcttccagaag

SEQ ID NO: 4265 - DNA, 20 bp, Artificial Sequence
  Description of Artificial Sequence: Synthetic oligonucleotide
ccgccaggtcttccagaaga

SEQ ID NO: 4266 - DNA, 20 bp, Artificial Sequence
  Description of Artificial Sequence: Synthetic oligonucleotide
cgccaggtcttccagaagat

SEQ ID NO: 4267 - DNA, 20 bp, Artificial Sequence
  Description of Artificial Sequence: Synthetic oligonucleotide
gccaggtcttccagaagatt

SEQ ID NO: 4268 - DNA, 20 bp, Artificial Sequence
  Description of Artificial Sequence: Synthetic oligonucleotide
ccaggtcttccagaagattc

SEQ ID NO: 4269 - DNA, 20 bp, Artificial Sequence
  Description of Artificial Sequence: Synthetic oligonucleotide
caggtcttccagaagattcc

SEQ ID NO: 4270 - DNA, 20 bp, Artificial Sequence
  Description of Artificial Sequence: Synthetic oligonucleotide
aggtcttccagaagattccc

SEQ ID NO: 4271 - DNA, 20 bp, Artificial Sequence
  Description of Artificial Sequence: Synthetic oligonucleotide
ggtcttccagaagattccct

SEQ ID NO: 4272 - DNA, 20 bp, Artificial Sequence
  Description of Artificial Sequence: Synthetic oligonucleotide
gtcttccagaagattccctt

SEQ ID NO: 4273 - DNA, 20 bp, Artificial Sequence
  Description of Artificial Sequence: Synthetic oligonucleotide
tcttccagaagattcccttc

SEQ ID NO: 4274 - DNA, 20 bp, Artificial Sequence
  Description of Artificial Sequence: Synthetic oligonucleotide
cttccagaagattcccttct

SEQ ID NO: 4275 - DNA, 20 bp, Artificial Sequence
  Description of Artificial Sequence: Synthetic oligonucleotide
ttccagaagattcccttctt

SEQ ID NO: 4276 - DNA, 20 bp, Artificial Sequence
  Description of Artificial Sequence: Synthetic oligonucleotide
tccagaagattcccttctta

SEQ ID NO: 4277 - DNA, 20 bp, Artificial Sequence
  Description of Artificial Sequence: Synthetic oligonucleotide
ccagaagattcccttcttaa

SEQ ID NO: 4278 - DNA, 20 bp, Artificial Sequence
  Description of Artificial Sequence: Synthetic oligonucleotide
cagaagattcccttcttaag

SEQ ID NO: 4279 - DNA, 20 bp, Artificial Sequence
  Description of Artificial Sequence: Synthetic oligonucleotide
agaagattcccttcttaagc

SEQ ID NO: 4280 - DNA, 20 bp, Artificial Sequence
  Description of Artificial Sequence: Synthetic oligonucleotide
gaagattcccttcttaagct

SEQ ID NO: 4281 - DNA, 20 bp, Artificial Sequence
  Description of Artificial Sequence: Synthetic oligonucleotide
aagattcccttcttaagctt

SEQ ID NO: 4282 - DNA, 20 bp, Artificial Sequence
  Description of Artificial Sequence: Synthetic oligonucleotide
agattcccttcttaagcttc

SEQ ID NO: 4283 - DNA, 20 bp, Artificial Sequence
  Description of Artificial Sequence: Synthetic oligonucleotide
gattcccttcttaagcttct

SEQ ID NO: 4284 - DNA, 20 bp, Artificial Sequence
  Description of Artificial Sequence: Synthetic oligonucleotide
attcccttcttaagcttctg

SEQ ID NO: 4285 - DNA, 20 bp, Artificial Sequence
  Description of Artificial Sequence: Synthetic oligonucleotide
ttcccttcttaagcttctgc

SEQ ID NO: 4286 - DNA, 20 bp, Artificial Sequence
  Description of Artificial Sequence: Synthetic oligonucleotide
tcccttcttaagcttctgcc

SEQ ID NO: 4287 - DNA, 20 bp, Artificial Sequence
  Description of Artificial Sequence: Synthetic oligonucleotide
cccttcttaagcttctgccg

SEQ ID NO: 4288 - DNA, 20 bp, Artificial Sequence
  Description of Artificial Sequence: Synthetic oligonucleotide
ccttcttaagcttctgccgc

SEQ ID NO: 4289 - DNA, 20 bp, Artificial Sequence
  Description of Artificial Sequence: Synthetic oligonucleotide
cttcttaagcttctgccgct

SEQ ID NO: 4290 - DNA, 20 bp, Artificial Sequence
  Description of Artificial Sequence: Synthetic oligonucleotide
ttcttaagcttctgccgctg

SEQ ID NO: 4291 - DNA, 20 bp, Artificial Sequence
  Description of Artificial Sequence: Synthetic oligonucleotide
tcttaagcttctgccgctgc

SEQ ID NO: 4292 - DNA, 20 bp, Artificial Sequence
  Description of Artificial Sequence: Synthetic oligonucleotide
cttaagcttctgccgctgct

SEQ ID NO: 4293 - DNA, 20 bp, Artificial Sequence
  Description of Artificial Sequence: Synthetic oligonucleotide
ttaagcttctgccgctgctg

SEQ ID NO: 4294 - DNA, 20 bp, Artificial Sequence
  Description of Artificial Sequence: Synthetic oligonucleotide
taagcttctgccgctgctgt

SEQ ID NO: 4295 - DNA, 20 bp, Artificial Sequence
  Description of Artificial Sequence: Synthetic oligonucleotide
aagcttctgccgctgctgtg

SEQ ID NO: 4296 - DNA, 20 bp, Artificial Sequence
  Description of Artificial Sequence: Synthetic oligonucleotide
agcttctgccgctgctgtgg

SEQ ID NO: 4297 - DNA, 20 bp, Artificial Sequence
  Description of Artificial Sequence: Synthetic oligonucleotide
gcttctgccgctgctgtggg

SEQ ID NO: 4298 - DNA, 20 bp, Artificial Sequence
  Description of Artificial Sequence: Synthetic oligonucleotide
cttctgccgctgctgtggga

SEQ ID NO: 4299 - DNA, 20 bp, Artificial Sequence
  Description of Artificial Sequence: Synthetic oligonucleotide
ttctgccgctgctgtgggat

SEQ ID NO: 4300 - DNA, 20 bp, Artificial Sequence
  Description of Artificial Sequence: Synthetic oligonucleotide
tctgccgctgctgtgggatg

SEQ ID NO: 4301 - DNA, 20 bp, Artificial Sequence
  Description of Artificial Sequence: Synthetic oligonucleotide
ctgccgctgctgtgggatgg

SEQ ID NO: 4302 - DNA, 20 bp, Artificial Sequence
  Description of Artificial Sequence: Synthetic oligonucleotide
tgccgctgctgtgggatgga

SEQ ID NO: 4303 - DNA, 20 bp, Artificial Sequence
  Description of Artificial Sequence: Synthetic oligonucleotide
gccgctgctgtgggatggag

SEQ ID NO: 4304 - DNA, 20 bp, Artificial Sequence
  Description of Artificial Sequence: Synthetic oligonucleotide
ccgctgctgtgggatggagc

SEQ ID NO: 4305 - DNA, 20 bp, Artificial Sequence
  Description of Artificial Sequence: Synthetic oligonucleotide
cgctgctgtgggatggagcg

SEQ ID NO: 4306 - DNA, 20 bp, Artificial Sequence
  Description of Artificial Sequence: Synthetic oligonucleotide
gctgctgtgggatggagcgg

SEQ ID NO: 4307 - DNA, 20 bp, Artificial Sequence
  Description of Artificial Sequence: Synthetic oligonucleotide
ctgctgtgggatggagcgga

SEQ ID NO: 4308 - DNA, 20 bp, Artificial Sequence
  Description of Artificial Sequence: Synthetic oligonucleotide
tgctgtgggatggagcggaa

SEQ ID NO: 4309 - DNA, 20 bp, Artificial Sequence
  Description of Artificial Sequence: Synthetic oligonucleotide
gctgtgggatggagcggaag

SEQ ID NO: 4310 - DNA, 20 bp, Artificial Sequence
  Description of Artificial Sequence: Synthetic oligonucleotide
ctgtgggatggagcggaagt

SEQ ID NO: 4311 - DNA, 20 bp, Artificial Sequence
  Description of Artificial Sequence: Synthetic oligonucleotide
tgtgggatggagcggaagta

SEQ ID NO: 4312 - DNA, 20 bp, Artificial Sequence
  Description of Artificial Sequence: Synthetic oligonucleotide
gtgggatggagcggaagtac

SEQ ID NO: 4313 - DNA, 20 bp, Artificial Sequence
  Description of Artificial Sequence: Synthetic oligonucleotide
tgggatggagcggaagtact

SEQ ID NO: 4314 - DNA, 20 bp, Artificial Sequence
  Description of Artificial Sequence: Synthetic oligonucleotide
gggatggagcggaagtactg

SEQ ID NO: 4315 - DNA, 20 bp, Artificial Sequence
  Description of Artificial Sequence: Synthetic oligonucleotide
ggatggagcggaagtactgg

SEQ ID NO: 4316 - DNA, 20 bp, Artificial Sequence
  Description of Artificial Sequence: Synthetic oligonucleotide
gatggagcggaagtactggc

SEQ ID NO: 4317 - DNA, 20 bp, Artificial Sequence
  Description of Artificial Sequence: Synthetic oligonucleotide
atggagcggaagtactggcc

SEQ ID NO: 4318 - DNA, 20 bp, Artificial Sequence
  Description of Artificial Sequence: Synthetic oligonucleotide
tggagcggaagtactggccg

SEQ ID NO: 4319 - DNA, 20 bp, Artificial Sequence
  Description of Artificial Sequence: Synthetic oligonucleotide
ggagcggaagtactggccgt

SEQ ID NO: 4320 - DNA, 20 bp, Artificial Sequence
  Description of Artificial Sequence: Synthetic oligonucleotide
gagcggaagtactggccgtt

SEQ ID NO: 4321 - DNA, 20 bp, Artificial Sequence
  Description of Artificial Sequence: Synthetic oligonucleotide
agcggaagtactggccgttg

SEQ ID NO: 4322 - DNA, 20 bp, Artificial Sequence
  Description of Artificial Sequence: Synthetic oligonucleotide
gcggaagtactggccgttga

SEQ ID NO: 4323 - DNA, 20 bp, Artificial Sequence
  Description of Artificial Sequence: Synthetic oligonucleotide
cggaagtactggccgttgag

SEQ ID NO: 4324 - DNA, 20 bp, Artificial Sequence
  Description of Artificial Sequence: Synthetic oligonucleotide
ggaagtactggccgttgagg

SEQ ID NO: 4325 - DNA, 20 bp, Artificial Sequence
  Description of Artificial Sequence: Synthetic oligonucleotide
gaagtactggccgttgaggt

SEQ ID NO: 4326 - DNA, 20 bp, Artificial Sequence
  Description of Artificial Sequence: Synthetic oligonucleotide
aagtactggccgttgaggtt

SEQ ID NO: 4327 - DNA, 20 bp, Artificial Sequence
  Description of Artificial Sequence: Synthetic oligonucleotide
agtactggccgttgaggttg

SEQ ID NO: 4328 - DNA, 20 bp, Artificial Sequence
  Description of Artificial Sequence: Synthetic oligonucleotide
gtactggccgttgaggttgg

SEQ ID NO: 4329 - DNA, 20 bp, Artificial Sequence
  Description of Artificial Sequence: Synthetic oligonucleotide
tactggccgttgaggttgga

SEQ ID NO: 4330 - DNA, 20 bp, Artificial Sequence
  Description of Artificial Sequence: Synthetic oligonucleotide
actggccgttgaggttggaa

SEQ ID NO: 4331 - DNA, 20 bp, Artificial Sequence
  Description of Artificial Sequence: Synthetic oligonucleotide
ctggccgttgaggttggaat

SEQ ID NO: 4332 - DNA, 20 bp, Artificial Sequence
  Description of Artificial Sequence: Synthetic oligonucleotide
tggccgttgaggttggaatg

SEQ ID NO: 4333 - DNA, 20 bp, Artificial Sequence
  Description of Artificial Sequence: Synthetic oligonucleotide
ggccgttgaggttggaatgg

SEQ ID NO: 4334 - DNA, 20 bp, Artificial Sequence
  Description of Artificial Sequence: Synthetic oligonucleotide
gccgttgaggttggaatggc

SEQ ID NO: 4335 - DNA, 20 bp, Artificial Sequence
  Description of Artificial Sequence: Synthetic oligonucleotide
ccgttgaggttggaatggct

SEQ ID NO: 4336 - DNA, 20 bp, Artificial Sequence
  Description of Artificial Sequence: Synthetic oligonucleotide
cgttgaggttggaatggctg

SEQ ID NO: 4337 - DNA, 20 bp, Artificial Sequence
  Description of Artificial Sequence: Synthetic oligonucleotide
gttgaggttggaatggctgc

SEQ ID NO: 4338 - DNA, 20 bp, Artificial Sequence
  Description of Artificial Sequence: Synthetic oligonucleotide
ttgaggttggaatggctgca

SEQ ID NO: 4339 - DNA, 20 bp, Artificial Sequence
  Description of Artificial Sequence: Synthetic oligonucleotide
tgaggttggaatggctgcag

SEQ ID NO: 4340 - DNA, 20 bp, Artificial Sequence
  Description of Artificial Sequence: Synthetic oligonucleotide
gaggttggaatggctgcagg

SEQ ID NO: 4341 - DNA, 20 bp, Artificial Sequence
  Description of Artificial Sequence: Synthetic oligonucleotide
aggttggaatggctgcaggt

SEQ ID NO: 4342 - DNA, 20 bp, Artificial Sequence
  Description of Artificial Sequence: Synthetic oligonucleotide
ggttggaatggctgcaggtg

SEQ ID NO: 4343 - DNA, 20 bp, Artificial Sequence
  Description of Artificial Sequence: Synthetic oligonucleotide
gttggaatggctgcaggtgc

SEQ ID NO: 4344 - DNA, 20 bp, Artificial Sequence
  Description of Artificial Sequence: Synthetic oligonucleotide
ttggaatggctgcaggtgcc

SEQ ID NO: 4345 - DNA, 20 bp, Artificial Sequence
  Description of Artificial Sequence: Synthetic oligonucleotide
tggaatggctgcaggtgcca

SEQ ID NO: 4346 - DNA, 20 bp, Artificial Sequence
  Description of Artificial Sequence: Synthetic oligonucleotide
ggaatggctgcaggtgccaa

SEQ ID NO: 4347 - DNA, 20 bp, Artificial Sequence
  Description of Artificial Sequence: Synthetic oligonucleotide
gaatggctgcaggtgccaaa

SEQ ID NO: 4348 - DNA, 20 bp, Artificial Sequence
  Description of Artificial Sequence: Synthetic oligonucleotide
aatggctgcaggtgccaaac

SEQ ID NO: 4349 - DNA, 20 bp, Artificial Sequence
  Description of Artificial Sequence: Synthetic oligonucleotide
atggctgcaggtgccaaacc

SEQ ID NO: 4350 - DNA, 20 bp, Artificial Sequence
  Description of Artificial Sequence: Synthetic oligonucleotide
tggctgcaggtgccaaacca

SEQ ID NO: 4351 - DNA, 20 bp, Artificial Sequence
  Description of Artificial Sequence: Synthetic oligonucleotide
ggctgcaggtgccaaaccac

SEQ ID NO: 4352 - DNA, 20 bp, Artificial Sequence
  Description of Artificial Sequence: Synthetic oligonucleotide
gctgcaggtgccaaaccacc

SEQ ID NO: 4353 - DNA, 20 bp, Artificial Sequence
  Description of Artificial Sequence: Synthetic oligonucleotide
ctgcaggtgccaaaccacca

SEQ ID NO: 4354 - DNA, 20 bp, Artificial Sequence
  Description of Artificial Sequence: Synthetic oligonucleotide
tgcaggtgccaaaccaccag

SEQ ID NO: 4355 - DNA, 20 bp, Artificial Sequence
  Description of Artificial Sequence: Synthetic oligonucleotide
gcaggtgccaaaccaccagc

SEQ ID NO: 4356 - DNA, 20 bp, Artificial Sequence
  Description of Artificial Sequence: Synthetic oligonucleotide
caggtgccaaaccaccagcc

SEQ ID NO: 4357 - DNA, 20 bp, Artificial Sequence
  Description of Artificial Sequence: Synthetic oligonucleotide
aggtgccaaaccaccagcct

SEQ ID NO: 4358 - DNA, 20 bp, Artificial Sequence
  Description of Artificial Sequence: Synthetic oligonucleotide
ggtgccaaaccaccagcctc

SEQ ID NO: 4359 - DNA, 20 bp, Artificial Sequence
  Description of Artificial Sequence: Synthetic oligonucleotide
gtgccaaaccaccagcctcc

SEQ ID NO: 4360 - DNA, 20 bp, Artificial Sequence
  Description of Artificial Sequence: Synthetic oligonucleotide
tgccaaaccaccagcctcct

SEQ ID NO: 4361 - DNA, 20 bp, Artificial Sequence
  Description of Artificial Sequence: Synthetic oligonucleotide
gccaaaccaccagcctcctg

SEQ ID NO: 4362 - DNA, 20 bp, Artificial Sequence
  Description of Artificial Sequence: Synthetic oligonucleotide
ccaaaccaccagcctcctgc

SEQ ID NO: 4363 - DNA, 20 bp, Artificial Sequence
  Description of Artificial Sequence: Synthetic oligonucleotide
caaaccaccagcctcctgcc

SEQ ID NO: 4364 - DNA, 20 bp, Artificial Sequence
  Description of Artificial Sequence: Synthetic oligonucleotide
aaaccaccagcctcctgccg

SEQ ID NO: 4365 - DNA, 20 bp, Artificial Sequence
  Description of Artificial Sequence: Synthetic oligonucleotide
aaccaccagcctcctgccgg

SEQ ID NO: 4366 - DNA, 20 bp, Artificial Sequence
  Description of Artificial Sequence: Synthetic oligonucleotide
accaccagcctcctgccggg

SEQ ID NO: 4367 - DNA, 20 bp, Artificial Sequence
  Description of Artificial Sequence: Synthetic oligonucleotide
ccaccagcctcctgccgggg

SEQ ID NO: 4368 - DNA, 20 bp, Artificial Sequence
  Description of Artificial Sequence: Synthetic oligonucleotide
caccagcctcctgccggggt

SEQ ID NO: 4369 - DNA, 20 bp, Artificial Sequence
  Description of Artificial Sequence: Synthetic oligonucleotide
accagcctcctgccggggtc

SEQ ID NO: 4370 - DNA, 20 bp, Artificial Sequence
  Description of Artificial Sequence: Synthetic oligonucleotide
ccagcctcctgccggggtca

SEQ ID NO: 4371 - DNA, 20 bp, Artificial Sequence
  Description of Artificial Sequence: Synthetic oligonucleotide
cagcctcctgccggggtcag

SEQ ID NO: 4372 - DNA, 20 bp, Artificial Sequence
  Description of Artificial Sequence: Synthetic oligonucleotide
agcctcctgccggggtcagg

SEQ ID NO: 4373 - DNA, 20 bp, Artificial Sequence
  Description of Artificial Sequence: Synthetic oligonucleotide
gcctcctgccggggtcaggg

SEQ ID NO: 4374 - DNA, 20 bp, Artificial Sequence
  Description of Artificial Sequence: Synthetic oligonucleotide
cctcctgccggggtcagggg

SEQ ID NO: 4375 - DNA, 20 bp, Artificial Sequence
  Description of Artificial Sequence: Synthetic oligonucleotide
ctcctgccggggtcagggga

SEQ ID NO: 4376 - DNA, 20 bp, Artificial Sequence
  Description of Artificial Sequence: Synthetic oligonucleotide
tcctgccggggtcaggggag

SEQ ID NO: 4377 - DNA, 20 bp, Artificial Sequence
  Description of Artificial Sequence: Synthetic oligonucleotide
cctgccggggtcaggggaga

SEQ ID NO: 4378 - DNA, 20 bp, Artificial Sequence
  Description of Artificial Sequence: Synthetic oligonucleotide
ctgccggggtcaggggagag

SEQ ID NO: 4379 - DNA, 20 bp, Artificial Sequence
  Description of Artificial Sequence: Synthetic oligonucleotide
tgccggggtcaggggagagg

SEQ ID NO: 4380 - DNA, 20 bp, Artificial Sequence
  Description of Artificial Sequence: Synthetic oligonucleotide
gccggggtcaggggagaggg

SEQ ID NO: 4381 - DNA, 20 bp, Artificial Sequence
  Description of Artificial Sequence: Synthetic oligonucleotide
ccggggtcaggggagaggga

SEQ ID NO: 4382 - DNA, 20 bp, Artificial Sequence
  Description of Artificial Sequence: Synthetic oligonucleotide
cggggtcaggggagagggaa

SEQ ID NO: 4383 - DNA, 20 bp, Artificial Sequence
  Description of Artificial Sequence: Synthetic oligonucleotide
ggggtcaggggagagggaac

SEQ ID NO: 4384 - DNA, 20 bp, Artificial Sequence
  Description of Artificial Sequence: Synthetic oligonucleotide
gggtcaggggagagggaaca

SEQ ID NO: 4385 - DNA, 20 bp, Artificial Sequence
  Description of Artificial Sequence: Synthetic oligonucleotide
ggtcaggggagagggaacat

SEQ ID NO: 4386 - DNA, 20 bp, Artificial Sequence
  Description of Artificial Sequence: Synthetic oligonucleotide
gtcaggggagagggaacatg

SEQ ID NO: 4387 - DNA, 20 bp, Artificial Sequence
  Description of Artificial Sequence: Synthetic oligonucleotide
tcaggggagagggaacatgg

SEQ ID NO: 4388 - DNA, 20 bp, Artificial Sequence
  Description of Artificial Sequence: Synthetic oligonucleotide
caggggagagggaacatggt

SEQ ID NO: 4389 - DNA, 20 bp, Artificial Sequence
  Description of Artificial Sequence: Synthetic oligonucleotide
aggggagagggaacatggtc

SEQ ID NO: 4390 - DNA, 20 bp, Artificial Sequence
  Description of Artificial Sequence: Synthetic oligonucleotide
ggggagagggaacatggtca

SEQ ID NO: 4391 - DNA, 20 bp, Artificial Sequence
  Description of Artificial Sequence: Synthetic oligonucleotide
gggagagggaacatggtcag

SEQ ID NO: 4392 - DNA, 20 bp, Artificial Sequence
  Description of Artificial Sequence: Synthetic oligonucleotide
ggagagggaacatggtcagg

SEQ ID NO: 4393 - DNA, 20 bp, Artificial Sequence
  Description of Artificial Sequence: Synthetic oligonucleotide
gagagggaacatggtcaggt

SEQ ID NO: 4394 - DNA, 20 bp, Artificial Sequence
  Description of Artificial Sequence: Synthetic oligonucleotide
agagggaacatggtcaggtc

SEQ ID NO: 4395 - DNA, 20 bp, Artificial Sequence
  Description of Artificial Sequence: Synthetic oligonucleotide
gagggaacatggtcaggtct

SEQ ID NO: 4396 - DNA, 20 bp, Artificial Sequence
  Description of Artificial Sequence: Synthetic oligonucleotide
agggaacatggtcaggtctt

SEQ ID NO: 4397 - DNA, 20 bp, Artificial Sequence
  Description of Artificial Sequence: Synthetic oligonucleotide
gggaacatggtcaggtcttt

SEQ ID NO: 4398 - DNA, 20 bp, Artificial Sequence
  Description of Artificial Sequence: Synthetic oligonucleotide
ggaacatggtcaggtctttg

SEQ ID NO: 4399 - DNA, 20 bp, Artificial Sequence
  Description of Artificial Sequence: Synthetic oligonucleotide
gaacatggtcaggtctttga

SEQ ID NO: 4400 - DNA, 20 bp, Artificial Sequence
  Description of Artificial Sequence: Synthetic oligonucleotide
aacatggtcaggtctttgag

SEQ ID NO: 4401 - DNA, 20 bp, Artificial Sequence
  Description of Artificial Sequence: Synthetic oligonucleotide
acatggtcaggtctttgagc

SEQ ID NO: 4402 - DNA, 20 bp, Artificial Sequence
  Description of Artificial Sequence: Synthetic oligonucleotide
catggtcaggtctttgagcc

SEQ ID NO: 4403 - DNA, 20 bp, Artificial Sequence
  Description of Artificial Sequence: Synthetic oligonucleotide
atggtcaggtctttgagcca

SEQ ID NO: 4404 - DNA, 20 bp, Artificial Sequence
  Description of Artificial Sequence: Synthetic oligonucleotide
tggtcaggtctttgagccac

SEQ ID NO: 4405 - DNA, 20 bp, Artificial Sequence
  Description of Artificial Sequence: Synthetic oligonucleotide
ggtcaggtctttgagccacc

SEQ ID NO: 4406 - DNA, 20 bp, Artificial Sequence
  Description of Artificial Sequence: Synthetic oligonucleotide
gtcaggtctttgagccaccg

SEQ ID NO: 4407 - DNA, 20 bp, Artificial Sequence
  Description of Artificial Sequence: Synthetic oligonucleotide
tcaggtctttgagccaccga

SEQ ID NO: 4408 - DNA, 20 bp, Artificial Sequence
  Description of Artificial Sequence: Synthetic oligonucleotide
caggtctttgagccaccgat

SEQ ID NO: 4409 - DNA, 20 bp, Artificial Sequence
  Description of Artificial Sequence: Synthetic oligonucleotide
aggtctttgagccaccgatg

SEQ ID NO: 4410 - DNA, 20 bp, Artificial Sequence
  Description of Artificial Sequence: Synthetic oligonucleotide
ggtctttgagccaccgatgg

SEQ ID NO: 4411 - DNA, 20 bp, Artificial Sequence
  Description of Artificial Sequence: Synthetic oligonucleotide
gtctttgagccaccgatggg

SEQ ID NO: 4412 - DNA, 20 bp, Artificial Sequence
  Description of Artificial Sequence: Synthetic oligonucleotide
tctttgagccaccgatgggg

SEQ ID NO: 4413 - DNA, 20 bp, Artificial Sequence
  Description of Artificial Sequence: Synthetic oligonucleotide
ctttgagccaccgatggggc

SEQ ID NO: 4414 - DNA, 20 bp, Artificial Sequence
  Description of Artificial Sequence: Synthetic oligonucleotide
tttgagccaccgatggggct

SEQ ID NO: 4415 - DNA, 20 bp, Artificial Sequence
  Description of Artificial Sequence: Synthetic oligonucleotide
ttgagccaccgatggggctg

SEQ ID NO: 4416 - DNA, 20 bp, Artificial Sequence
  Description of Artificial Sequence: Synthetic oligonucleotide
tgagccaccgatggggctga

SEQ ID NO: 4417 - DNA, 20 bp, Artificial Sequence
  Description of Artificial Sequence: Synthetic oligonucleotide
gagccaccgatggggctgaa

SEQ ID NO: 4418 - DNA, 20 bp, Artificial Sequence
  Description of Artificial Sequence: Synthetic oligonucleotide
agccaccgatggggctgaaa

SEQ ID NO: 4419 - DNA, 20 bp, Artificial Sequence
  Description of Artificial Sequence: Synthetic oligonucleotide
gccaccgatggggctgaaag

SEQ ID NO: 4420 - DNA, 20 bp, Artificial Sequence
  Description of Artificial Sequence: Synthetic oligonucleotide
ccaccgatggggctgaaagg

SEQ ID NO: 4421 - DNA, 20 bp, Artificial Sequence
  Description of Artificial Sequence: Synthetic oligonucleotide
caccgatggggctgaaagga

SEQ ID NO: 4422 - DNA, 20 bp, Artificial Sequence
  Description of Artificial Sequence: Synthetic oligonucleotide
accgatggggctgaaaggag

SEQ ID NO: 4423 - DNA, 20 bp, Artificial Sequence
  Description of Artificial Sequence: Synthetic oligonucleotide
ccgatggggctgaaaggaga

SEQ ID NO: 4424 - DNA, 20 bp, Artificial Sequence
  Description of Artificial Sequence: Synthetic oligonucleotide
cgatggggctgaaaggagat

SEQ ID NO: 4425 - DNA, 20 bp, Artificial Sequence
  Description of Artificial Sequence: Synthetic oligonucleotide
gatggggctgaaaggagata

SEQ ID NO: 4426 - DNA, 20 bp, Artificial Sequence
  Description of Artificial Sequence: Synthetic oligonucleotide
atggggctgaaaggagatag

SEQ ID NO: 4427 - DNA, 20 bp, Artificial Sequence
  Description of Artificial Sequence: Synthetic oligonucleotide
tggggctgaaaggagatagg

SEQ ID NO: 4428 - DNA, 20 bp, Artificial Sequence
  Description of Artificial Sequence: Synthetic oligonucleotide
ggggctgaaaggagataggg

SEQ ID NO: 4429 - DNA, 20 bp, Artificial Sequence
  Description of Artificial Sequence: Synthetic oligonucleotide
gggctgaaaggagataggga

SEQ ID NO: 4430 - DNA, 20 bp, Artificial Sequence
  Description of Artificial Sequence: Synthetic oligonucleotide
ggctgaaaggagatagggat

SEQ ID NO: 4431 - DNA, 20 bp, Artificial Sequence
  Description of Artificial Sequence: Synthetic oligonucleotide
gctgaaaggagatagggata

SEQ ID NO: 4432 - DNA, 20 bp, Artificial Sequence
  Description of Artificial Sequence: Synthetic oligonucleotide
ctgaaaggagatagggatag

SEQ ID NO: 4433 - DNA, 20 bp, Artificial Sequence
  Description of Artificial Sequence: Synthetic oligonucleotide
tgaaaggagatagggatagg

SEQ ID NO: 4434 - DNA, 20 bp, Artificial Sequence
  Description of Artificial Sequence: Synthetic oligonucleotide
gaaaggagatagggataggg

SEQ ID NO: 4435 - DNA, 20 bp, Artificial Sequence
  Description of Artificial Sequence: Synthetic oligonucleotide
aaaggagatagggatagggt

SEQ ID NO: 4436 - DNA, 20 bp, Artificial Sequence
  Description of Artificial Sequence: Synthetic oligonucleotide
aaggagatagggatagggtt

SEQ ID NO: 4437 - DNA, 20 bp, Artificial Sequence
  Description of Artificial Sequence: Synthetic oligonucleotide
aggagatagggatagggttg

SEQ ID NO: 4438 - DNA, 20 bp, Artificial Sequence
  Description of Artificial Sequence: Synthetic oligonucleotide
ggagatagggatagggttga

SEQ ID NO: 4439 - DNA, 20 bp, Artificial Sequence
  Description of Artificial Sequence: Synthetic oligonucleotide
gagatagggatagggttgag

SEQ ID NO: 4440 - DNA, 20 bp, Artificial Sequence
  Description of Artificial Sequence: Synthetic oligonucleotide
agatagggatagggttgagg

SEQ ID NO: 4441 - DNA, 20 bp, Artificial Sequence
  Description of Artificial Sequence: Synthetic oligonucleotide
gatagggatagggttgagga

SEQ ID NO: 4442 - DNA, 20 bp, Artificial Sequence
  Description of Artificial Sequence: Synthetic oligonucleotide
atagggatagggttgaggat

SEQ ID NO: 4443 - DNA, 20 bp, Artificial Sequence
  Description of Artificial Sequence: Synthetic oligonucleotide
tagggatagggttgaggatg

SEQ ID NO: 4444 - DNA, 20 bp, Artificial Sequence
  Description of Artificial Sequence: Synthetic oligonucleotide
agggatagggttgaggatga

SEQ ID NO: 4445 - DNA, 20 bp, Artificial Sequence
  Description of Artificial Sequence: Synthetic oligonucleotide
gggatagggttgaggatgag

SEQ ID NO: 4446 - DNA, 20 bp, Artificial Sequence
  Description of Artificial Sequence: Synthetic oligonucleotide
ggatagggttgaggatgagg

SEQ ID NO: 4447 - DNA, 20 bp, Artificial Sequence
  Description of Artificial Sequence: Synthetic oligonucleotide
gatagggttgaggatgaggc

SEQ ID NO: 4448 - DNA, 20 bp, Artificial Sequence
  Description of Artificial Sequence: Synthetic oligonucleotide
atagggttgaggatgaggca

SEQ ID NO: 4449 - DNA, 20 bp, Artificial Sequence
  Description of Artificial Sequence: Synthetic oligonucleotide
tagggttgaggatgaggcag

SEQ ID NO: 4450 - DNA, 20 bp, Artificial Sequence
  Description of Artificial Sequence: Synthetic oligonucleotide
agggttgaggatgaggcagg

SEQ ID NO: 4451 - DNA, 20 bp, Artificial Sequence
  Description of Artificial Sequence: Synthetic oligonucleotide
gggttgaggatgaggcaggt

SEQ ID NO: 4452 - DNA, 20 bp, Artificial Sequence
  Description of Artificial Sequence: Synthetic oligonucleotide
ggttgaggatgaggcaggtt

SEQ ID NO: 4453 - DNA, 20 bp, Artificial Sequence
  Description of Artificial Sequence: Synthetic oligonucleotide
gttgaggatgaggcaggttg

SEQ ID NO: 4454 - DNA, 20 bp, Artificial Sequence
  Description of Artificial Sequence: Synthetic oligonucleotide
ttgaggatgaggcaggttgg

SEQ ID NO: 4455 - DNA, 20 bp, Artificial Sequence
  Description of Artificial Sequence: Synthetic oligonucleotide
tgaggatgaggcaggttggg

SEQ ID NO: 4456 - DNA, 20 bp, Artificial Sequence
  Description of Artificial Sequence: Synthetic oligonucleotide
gaggatgaggcaggttgggg

SEQ ID NO: 4457 - DNA, 20 bp, Artificial Sequence
  Description of Artificial Sequence: Synthetic oligonucleotide
aggatgaggcaggttgggga

SEQ ID NO: 4458 - DNA, 20 bp, Artificial Sequence
  Description of Artificial Sequence: Synthetic oligonucleotide
ggatgaggcaggttggggac

SEQ ID NO: 4459 - DNA, 20 bp, Artificial Sequence
  Description of Artificial Sequence: Synthetic oligonucleotide
gatgaggcaggttggggacc

SEQ ID NO: 4460 - DNA, 20 bp, Artificial Sequence
  Description of Artificial Sequence: Synthetic oligonucleotide
atgaggcaggttggggacca

SEQ ID NO: 4461 - DNA, 20 bp, Artificial Sequence
  Description of Artificial Sequence: Synthetic oligonucleotide
tgaggcaggttggggaccag

SEQ ID NO: 4462 - DNA, 20 bp, Artificial Sequence
  Description of Artificial Sequence: Synthetic oligonucleotide
gaggcaggttggggaccagg

SEQ ID NO: 4463 - DNA, 20 bp, Artificial Sequence
  Description of Artificial Sequence: Synthetic oligonucleotide
aggcaggttggggaccaggc

SEQ ID NO: 4464 - DNA, 20 bp, Artificial Sequence
  Description of Artificial Sequence: Synthetic oligonucleotide
ggcaggttggggaccaggct

SEQ ID NO: 4465 - DNA, 20 bp, Artificial Sequence
  Description of Artificial Sequence: Synthetic oligonucleotide
gcaggttggggaccaggctg

SEQ ID NO: 4466 - DNA, 20 bp, Artificial Sequence
  Description of Artificial Sequence: Synthetic oligonucleotide
caggttggggaccaggctgg

SEQ ID NO: 4467 - DNA, 20 bp, Artificial Sequence
  Description of Artificial Sequence: Synthetic oligonucleotide
aggttggggaccaggctggg

SEQ ID NO: 4468 - DNA, 20 bp, Artificial Sequence
  Description of Artificial Sequence: Synthetic oligonucleotide
ggttggggaccaggctgggc

SEQ ID NO: 4469 - DNA, 20 bp, Artificial Sequence
  Description of Artificial Sequence: Synthetic oligonucleotide
gttggggaccaggctgggct

SEQ ID NO: 4470 - DNA, 20 bp, Artificial Sequence
  Description of Artificial Sequence: Synthetic oligonucleotide
ttggggaccaggctgggctt

SEQ ID NO: 4471 - DNA, 20 bp, Artificial Sequence
  Description of Artificial Sequence: Synthetic oligonucleotide
tggggaccaggctgggcttt

SEQ ID NO: 4472 - DNA, 20 bp, Artificial Sequence
  Description of Artificial Sequence: Synthetic oligonucleotide
ggggaccaggctgggctttg

SEQ ID NO: 4473 - DNA, 20 bp, Artificial Sequence
  Description of Artificial Sequence: Synthetic oligonucleotide
gggaccaggctgggctttgg

SEQ ID NO: 4474 - DNA, 20 bp, Artificial Sequence
  Description of Artificial Sequence: Synthetic oligonucleotide
ggaccaggctgggctttgga

SEQ ID NO: 4475 - DNA, 20 bp, Artificial Sequence
  Description of Artificial Sequence: Synthetic oligonucleotide
gaccaggctgggctttggac

SEQ ID NO: 4476 - DNA, 20 bp, Artificial Sequence
  Description of Artificial Sequence: Synthetic oligonucleotide
accaggctgggctttggact

SEQ ID NO: 4477 - DNA, 20 bp, Artificial Sequence
  Description of Artificial Sequence: Synthetic oligonucleotide
ccaggctgggctttggactt

SEQ ID NO: 4478 - DNA, 20 bp, Artificial Sequence
  Description of Artificial Sequence: Synthetic oligonucleotide
caggctgggctttggacttg

SEQ ID NO: 4479 - DNA, 20 bp, Artificial Sequence
  Description of Artificial Sequence: Synthetic oligonucleotide
aggctgggctttggacttga

SEQ ID NO: 4480 - DNA, 20 bp, Artificial Sequence
  Description of Artificial Sequence: Synthetic oligonucleotide
ggctgggctttggacttgac

SEQ ID NO: 4481 - DNA, 20 bp, Artificial Sequence
  Description of Artificial Sequence: Synthetic oligonucleotide
gctgggctttggacttgact

SEQ ID NO: 4482 - DNA, 20 bp, Artificial Sequence
  Description of Artificial Sequence: Synthetic oligonucleotide
ctgggctttggacttgactt

SEQ ID NO: 4483 - DNA, 20 bp, Artificial Sequence
  Description of Artificial Sequence: Synthetic oligonucleotide
tgggctttggacttgacttt

SEQ ID NO: 4484 - DNA, 20 bp, Artificial Sequence
  Description of Artificial Sequence: Synthetic oligonucleotide
gggctttggacttgactttt

SEQ ID NO: 4485 - DNA, 20 bp, Artificial Sequence
  Description of Artificial Sequence: Synthetic oligonucleotide
ggctttggacttgacttttt

SEQ ID NO: 4486 - DNA, 20 bp, Artificial Sequence
  Description of Artificial Sequence: Synthetic oligonucleotide
gctttggacttgactttttt

SEQ ID NO: 4487 - DNA, 20 bp, Artificial Sequence
  Description of Artificial Sequence: Synthetic oligonucleotide
ctttggacttgacttttttt

SEQ ID NO: 4488 - DNA, 20 bp, Artificial Sequence
  Description of Artificial Sequence: Synthetic oligonucleotide
tttggacttgactttttttt

SEQ ID NO: 4489 - DNA, 20 bp, Artificial Sequence
  Description of Artificial Sequence: Synthetic oligonucleotide
ttggacttgacttttttttt

SEQ ID NO: 4490 - DNA, 20 bp, Artificial Sequence
  Description of Artificial Sequence: Synthetic oligonucleotide
tggacttgactttttttttt

SEQ ID NO: 4491 - DNA, 20 bp, Artificial Sequence
  Description of Artificial Sequence: Synthetic oligonucleotide
ggacttgacttttttttttt

SEQ ID NO: 4492 - DNA, 20 bp, Artificial Sequence
  Description of Artificial Sequence: Synthetic oligonucleotide
gacttgactttttttttttt

SEQ ID NO: 4493 - DNA, 20 bp, Artificial Sequence
  Description of Artificial Sequence: Synthetic oligonucleotide
acttgacttttttttttttg

SEQ ID NO: 4494 - DNA, 20 bp, Artificial Sequence
  Description of Artificial Sequence: Synthetic oligonucleotide
cttgacttttttttttttga

SEQ ID NO: 4495 - DNA, 20 bp, Artificial Sequence
  Description of Artificial Sequence: Synthetic oligonucleotide
ttgacttttttttttttgag

SEQ ID NO: 4496 - DNA, 20 bp, Artificial Sequence
  Description of Artificial Sequence: Synthetic oligonucleotide
tgacttttttttttttgaga

SEQ ID NO: 4497 - DNA, 20 bp, Artificial Sequence
  Description of Artificial Sequence: Synthetic oligonucleotide
gacttttttttttttgagat

SEQ ID NO: 4498 - DNA, 20 bp, Artificial Sequence
  Description of Artificial Sequence: Synthetic oligonucleotide
acttttttttttttgagatt

SEQ ID NO: 4499 - DNA, 20 bp, Artificial Sequence
  Description of Artificial Sequence: Synthetic oligonucleotide
cttttttttttttgagattg

SEQ ID NO: 4500 - DNA, 20 bp, Artificial Sequence
  Description of Artificial Sequence: Synthetic oligonucleotide
ttttttttttttgagattga

SEQ ID NO: 4501 - DNA, 20 bp, Artificial Sequence
  Description of Artificial Sequence: Synthetic oligonucleotide
tttttttttttgagattgag

SEQ ID NO: 4502 - DNA, 20 bp, Artificial Sequence
  Description of Artificial Sequence: Synthetic oligonucleotide
ttttttttttgagattgagt

SEQ ID NO: 4503 - DNA, 20 bp, Artificial Sequence
  Description of Artificial Sequence: Synthetic oligonucleotide
tttttttttgagattgagtc

SEQ ID NO: 4504 - DNA, 20 bp, Artificial Sequence
  Description of Artificial Sequence: Synthetic oligonucleotide
ttttttttgagattgagtct

SEQ ID NO: 4505 - DNA, 20 bp, Artificial Sequence
  Description of Artificial Sequence: Synthetic oligonucleotide
tttttttgagattgagtctt

SEQ ID NO: 4506 - DNA, 20 bp, Artificial Sequence
  Description of Artificial Sequence: Synthetic oligonucleotide
ttttttgagattgagtctta

SEQ ID NO: 4507 - DNA, 20 bp, Artificial Sequence
  Description of Artificial Sequence: Synthetic oligonucleotide
tttttgagattgagtcttac

SEQ ID NO: 4508 - DNA, 20 bp, Artificial Sequence
  Description of Artificial Sequence: Synthetic oligonucleotide
ttttgagattgagtcttact

SEQ ID NO: 4509 - DNA, 20 bp, Artificial Sequence
  Description of Artificial Sequence: Synthetic oligonucleotide
tttgagattgagtcttactc

SEQ ID NO: 4510 - DNA, 20 bp, Artificial Sequence
  Description of Artificial Sequence: Synthetic oligonucleotide
ttgagattgagtcttactct

SEQ ID NO: 4511 - DNA, 20 bp, Artificial Sequence
  Description of Artificial Sequence: Synthetic oligonucleotide
tgagattgagtcttactctg

SEQ ID NO: 4512 - DNA, 20 bp, Artificial Sequence
  Description of Artificial Sequence: Synthetic oligonucleotide
gagattgagtcttactctgt

SEQ ID NO: 4513 - DNA, 20 bp, Artificial Sequence
  Description of Artificial Sequence: Synthetic oligonucleotide
agattgagtcttactctgtc

SEQ ID NO: 4514 - DNA, 20 bp, Artificial Sequence
  Description of Artificial Sequence: Synthetic oligonucleotide
gattgagtcttactctgtca

SEQ ID NO: 4515 - DNA, 20 bp, Artificial Sequence
  Description of Artificial Sequence: Synthetic oligonucleotide
attgagtcttactctgtcac

SEQ ID NO: 4516 - DNA, 20 bp, Artificial Sequence
  Description of Artificial Sequence: Synthetic oligonucleotide
ttgagtcttactctgtcacc

SEQ ID NO: 4517 - DNA, 20 bp, Artificial Sequence
  Description of Artificial Sequence: Synthetic oligonucleotide
tgagtcttactctgtcaccc

SEQ ID NO: 4518 - DNA, 20 bp, Artificial Sequence
  Description of Artificial Sequence: Synthetic oligonucleotide
gagtcttactctgtcaccca

SEQ ID NO: 4519 - DNA, 20 bp, Artificial Sequence
  Description of Artificial Sequence: Synthetic oligonucleotide
agtcttactctgtcacccag

SEQ ID NO: 4520 - DNA, 20 bp, Artificial Sequence
  Description of Artificial Sequence: Synthetic oligonucleotide
gtcttactctgtcacccagg

SEQ ID NO: 4521 - DNA, 20 bp, Artificial Sequence
  Description of Artificial Sequence: Synthetic oligonucleotide
tcttactctgtcacccaggc

SEQ ID NO: 4522 - DNA, 20 bp, Artificial Sequence
  Description of Artificial Sequence: Synthetic oligonucleotide
cttactctgtcacccaggct

SEQ ID NO: 4523 - DNA, 20 bp, Artificial Sequence
  Description of Artificial Sequence: Synthetic oligonucleotide
ttactctgtcacccaggctg

SEQ ID NO: 4524 - DNA, 20 bp, Artificial Sequence
  Description of Artificial Sequence: Synthetic oligonucleotide
tactctgtcacccaggctgg

SEQ ID NO: 4525 - DNA, 20 bp, Artificial Sequence
  Description of Artificial Sequence: Synthetic oligonucleotide
actctgtcacccaggctgga

SEQ ID NO: 4526 - DNA, 20 bp, Artificial Sequence
  Description of Artificial Sequence: Synthetic oligonucleotide
ctctgtcacccaggctggag

SEQ ID NO: 4527 - DNA, 20 bp, Artificial Sequence
  Description of Artificial Sequence: Synthetic oligonucleotide
tctgtcacccaggctggagt

SEQ ID NO: 4528 - DNA, 20 bp, Artificial Sequence
  Description of Artificial Sequence: Synthetic oligonucleotide
ctgtcacccaggctggagtg

SEQ ID NO: 4529 - DNA, 20 bp, Artificial Sequence
  Description of Artificial Sequence: Synthetic oligonucleotide
tgtcacccaggctggagtgc

SEQ ID NO: 4530 - DNA, 20 bp, Artificial Sequence
  Description of Artificial Sequence: Synthetic oligonucleotide
gtcacccaggctggagtgca

SEQ ID NO: 4531 - DNA, 20 bp, Artificial Sequence
  Description of Artificial Sequence: Synthetic oligonucleotide
tcacccaggctggagtgcag

SEQ ID NO: 4532 - DNA, 20 bp, Artificial Sequence
  Description of Artificial Sequence: Synthetic oligonucleotide
cacccaggctggagtgcagt

SEQ ID NO: 4533 - DNA, 20 bp, Artificial Sequence
  Description of Artificial Sequence: Synthetic oligonucleotide
acccaggctggagtgcagtg

SEQ ID NO: 4534 - DNA, 20 bp, Artificial Sequence
  Description of Artificial Sequence: Synthetic oligonucleotide
cccaggctggagtgcagtgg

SEQ ID NO: 4535 - DNA, 20 bp, Artificial Sequence
  Description of Artificial Sequence: Synthetic oligonucleotide
ccaggctggagtgcagtggt

SEQ ID NO: 4536 - DNA, 20 bp, Artificial Sequence
  Description of Artificial Sequence: Synthetic oligonucleotide
caggctggagtgcagtggtg

SEQ ID NO: 4537 - DNA, 20 bp, Artificial Sequence
  Description of Artificial Sequence: Synthetic oligonucleotide
aggctggagtgcagtggtgc

SEQ ID NO: 4538 - DNA, 20 bp, Artificial Sequence
  Description of Artificial Sequence: Synthetic oligonucleotide
ggctggagtgcagtggtgcg

SEQ ID NO: 4539 - DNA, 20 bp, Artificial Sequence
  Description of Artificial Sequence: Synthetic oligonucleotide
gctggagtgcagtggtgcga

SEQ ID NO: 4540 - DNA, 20 bp, Artificial Sequence
  Description of Artificial Sequence: Synthetic oligonucleotide
ctggagtgcagtggtgcgat

SEQ ID NO: 4541 - DNA, 20 bp, Artificial Sequence
  Description of Artificial Sequence: Synthetic oligonucleotide
tggagtgcagtggtgcgatc

SEQ ID NO: 4542 - DNA, 20 bp, Artificial Sequence
  Description of Artificial Sequence: Synthetic oligonucleotide
ggagtgcagtggtgcgatct

SEQ ID NO: 4543 - DNA, 20 bp, Artificial Sequence
  Description of Artificial Sequence: Synthetic oligonucleotide
gagtgcagtggtgcgatctc

SEQ ID NO: 4544 - DNA, 20 bp, Artificial Sequence
  Description of Artificial Sequence: Synthetic oligonucleotide
agtgcagtggtgcgatctca

SEQ ID NO: 4545 - DNA, 20 bp, Artificial Sequence
  Description of Artificial Sequence: Synthetic oligonucleotide
gtgcagtggtgcgatctcag

SEQ ID NO: 4546 - DNA, 20 bp, Artificial Sequence
  Description of Artificial Sequence: Synthetic oligonucleotide
tgcagtggtgcgatctcagc

SEQ ID NO: 4547 - DNA, 20 bp, Artificial Sequence
  Description of Artificial Sequence: Synthetic oligonucleotide
gcagtggtgcgatctcagct

SEQ ID NO: 4548 - DNA, 20 bp, Artificial Sequence
  Description of Artificial Sequence: Synthetic oligonucleotide
cagtggtgcgatctcagctc

SEQ ID NO: 4549 - DNA, 20 bp, Artificial Sequence
  Description of Artificial Sequence: Synthetic oligonucleotide
agtggtgcgatctcagctca

SEQ ID NO: 4550 - DNA, 20 bp, Artificial Sequence
  Description of Artificial Sequence: Synthetic oligonucleotide
gtggtgcgatctcagctcac

SEQ ID NO: 4551 - DNA, 20 bp, Artificial Sequence
  Description of Artificial Sequence: Synthetic oligonucleotide
tggtgcgatctcagctcact

SEQ ID NO: 4552 - DNA, 20 bp, Artificial Sequence
  Description of Artificial Sequence: Synthetic oligonucleotide
ggtgcgatctcagctcactg

SEQ ID NO: 4553 - DNA, 20 bp, Artificial Sequence
  Description of Artificial Sequence: Synthetic oligonucleotide
gtgcgatctcagctcactgc

SEQ ID NO: 4554 - DNA, 20 bp, Artificial Sequence
  Description of Artificial Sequence: Synthetic oligonucleotide
tgcgatctcagctcactgca

SEQ ID NO: 4555 - DNA, 20 bp, Artificial Sequence
  Description of Artificial Sequence: Synthetic oligonucleotide
gcgatctcagctcactgcaa

SEQ ID NO: 4556 - DNA, 20 bp, Artificial Sequence
  Description of Artificial Sequence: Synthetic oligonucleotide
cgatctcagctcactgcaac

SEQ ID NO: 4557 - DNA, 20 bp, Artificial Sequence
  Description of Artificial Sequence: Synthetic oligonucleotide
gatctcagctcactgcaacc

SEQ ID NO: 4558 - DNA, 20 bp, Artificial Sequence
  Description of Artificial Sequence: Synthetic oligonucleotide
atctcagctcactgcaacct

SEQ ID NO: 4559 - DNA, 20 bp, Artificial Sequence
  Description of Artificial Sequence: Synthetic oligonucleotide
tctcagctcactgcaacctc

SEQ ID NO: 4560 - DNA, 20 bp, Artificial Sequence
  Description of Artificial Sequence: Synthetic oligonucleotide
ctcagctcactgcaacctcc

SEQ ID NO: 4561 - DNA, 20 bp, Artificial Sequence
  Description of Artificial Sequence: Synthetic oligonucleotide
tcagctcactgcaacctccg

SEQ ID NO: 4562 - DNA, 20 bp, Artificial Sequence
  Description of Artificial Sequence: Synthetic oligonucleotide
cagctcactgcaacctccgt

SEQ ID NO: 4563 - DNA, 20 bp, Artificial Sequence
  Description of Artificial Sequence: Synthetic oligonucleotide
agctcactgcaacctccgtc

SEQ ID NO: 4564 - DNA, 20 bp, Artificial Sequence
  Description of Artificial Sequence: Synthetic oligonucleotide
gctcactgcaacctccgtct

SEQ ID NO: 4565 - DNA, 20 bp, Artificial Sequence
  Description of Artificial Sequence: Synthetic oligonucleotide
ctcactgcaacctccgtctc

SEQ ID NO: 4566 - DNA, 20 bp, Artificial Sequence
  Description of Artificial Sequence: Synthetic oligonucleotide
tcactgcaacctccgtctct

SEQ ID NO: 4567 - DNA, 20 bp, Artificial Sequence
  Description of Artificial Sequence: Synthetic oligonucleotide
cactgcaacctccgtctctc

SEQ ID NO: 4568 - DNA, 20 bp, Artificial Sequence
  Description of Artificial Sequence: Synthetic oligonucleotide
actgcaacctccgtctctca

SEQ ID NO: 4569 - DNA, 20 bp, Artificial Sequence
  Description of Artificial Sequence: Synthetic oligonucleotide
ctgcaacctccgtctctcag

SEQ ID NO: 4570 - DNA, 20 bp, Artificial Sequence
  Description of Artificial Sequence: Synthetic oligonucleotide
tgcaacctccgtctctcagg

SEQ ID NO: 4571 - DNA, 20 bp, Artificial Sequence
  Description of Artificial Sequence: Synthetic oligonucleotide
gcaacctccgtctctcaggt

SEQ ID NO: 4572 - DNA, 20 bp, Artificial Sequence
  Description of Artificial Sequence: Synthetic oligonucleotide
caacctccgtctctcaggtt

SEQ ID NO: 4573 - DNA, 20 bp, Artificial Sequence
  Description of Artificial Sequence: Synthetic oligonucleotide
aacctccgtctctcaggttt

SEQ ID NO: 4574 - DNA, 20 bp, Artificial Sequence
  Description of Artificial Sequence: Synthetic oligonucleotide
acctccgtctctcaggttta

SEQ ID NO: 4575 - DNA, 20 bp, Artificial Sequence
  Description of Artificial Sequence: Synthetic oligonucleotide
cctccgtctctcaggtttaa

SEQ ID NO: 4576 - DNA, 20 bp, Artificial Sequence
  Description of Artificial Sequence: Synthetic oligonucleotide
ctccgtctctcaggtttaag

SEQ ID NO: 4577 - DNA, 20 bp, Artificial Sequence
  Description of Artificial Sequence: Synthetic oligonucleotide
tccgtctctcaggtttaagt

SEQ ID NO: 4578 - DNA, 20 bp, Artificial Sequence
  Description of Artificial Sequence: Synthetic oligonucleotide
ccgtctctcaggtttaagtg

SEQ ID NO: 4579 - DNA, 20 bp, Artificial Sequence
  Description of Artificial Sequence: Synthetic oligonucleotide
cgtctctcaggtttaagtga

SEQ ID NO: 4580 - DNA, 20 bp, Artificial Sequence
  Description of Artificial Sequence: Synthetic oligonucleotide
gtctctcaggtttaagtgat

SEQ ID NO: 4581 - DNA, 20 bp, Artificial Sequence
  Description of Artificial Sequence: Synthetic oligonucleotide
tctctcaggtttaagtgatt

SEQ ID NO: 4582 - DNA, 20 bp, Artificial Sequence
  Description of Artificial Sequence: Synthetic oligonucleotide
ctctcaggtttaagtgattc

SEQ ID NO: 4583 - DNA, 20 bp, Artificial Sequence
  Description of Artificial Sequence: Synthetic oligonucleotide
tctcaggtttaagtgattct

SEQ ID NO: 4584 - DNA, 20 bp, Artificial Sequence
  Description of Artificial Sequence: Synthetic oligonucleotide
ctcaggtttaagtgattctc

SEQ ID NO: 4585 - DNA, 20 bp, Artificial Sequence
  Description of Artificial Sequence: Synthetic oligonucleotide
tcaggtttaagtgattctcc

SEQ ID NO: 4586 - DNA, 20 bp, Artificial Sequence
  Description of Artificial Sequence: Synthetic oligonucleotide
caggtttaagtgattctcct

SEQ ID NO: 4587 - DNA, 20 bp, Artificial Sequence
  Description of Artificial Sequence: Synthetic oligonucleotide
aggtttaagtgattctcctc

SEQ ID NO: 4588 - DNA, 20 bp, Artificial Sequence
  Description of Artificial Sequence: Synthetic oligonucleotide
ggtttaagtgattctcctcc

SEQ ID NO: 4589 - DNA, 20 bp, Artificial Sequence
  Description of Artificial Sequence: Synthetic oligonucleotide
gtttaagtgattctcctccc

SEQ ID NO: 4590 - DNA, 20 bp, Artificial Sequence
  Description of Artificial Sequence: Synthetic oligonucleotide
tttaagtgattctcctccct

SEQ ID NO: 4591 - DNA, 20 bp, Artificial Sequence
  Description of Artificial Sequence: Synthetic oligonucleotide
ttaagtgattctcctccctc

SEQ ID NO: 4592 - DNA, 20 bp, Artificial Sequence
  Description of Artificial Sequence: Synthetic oligonucleotide
taagtgattctcctccctca

SEQ ID NO: 4593 - DNA, 20 bp, Artificial Sequence
  Description of Artificial Sequence: Synthetic oligonucleotide
aagtgattctcctccctcag

SEQ ID NO: 4594 - DNA, 20 bp, Artificial Sequence
  Description of Artificial Sequence: Synthetic oligonucleotide
agtgattctcctccctcagc

SEQ ID NO: 4595 - DNA, 20 bp, Artificial Sequence
  Description of Artificial Sequence: Synthetic oligonucleotide
gtgattctcctccctcagcc

SEQ ID NO: 4596 - DNA, 20 bp, Artificial Sequence
  Description of Artificial Sequence: Synthetic oligonucleotide
tgattctcctccctcagcct

SEQ ID NO: 4597 - DNA, 20 bp, Artificial Sequence
  Description of Artificial Sequence: Synthetic oligonucleotide
gattctcctccctcagcctc

SEQ ID NO: 4598 - DNA, 20 bp, Artificial Sequence
  Description of Artificial Sequence: Synthetic oligonucleotide
attctcctccctcagcctcc

SEQ ID NO: 4599 - DNA, 20 bp, Artificial Sequence
  Description of Artificial Sequence: Synthetic oligonucleotide
ttctcctccctcagcctccc

SEQ ID NO: 4600 - DNA, 20 bp, Artificial Sequence
  Description of Artificial Sequence: Synthetic oligonucleotide
tctcctccctcagcctcccg

SEQ ID NO: 4601 - DNA, 20 bp, Artificial Sequence
  Description of Artificial Sequence: Synthetic oligonucleotide
ctcctccctcagcctcccga

SEQ ID NO: 4602 - DNA, 20 bp, Artificial Sequence
  Description of Artificial Sequence: Synthetic oligonucleotide
tcctccctcagcctcccgag

SEQ ID NO: 4603 - DNA, 20 bp, Artificial Sequence
  Description of Artificial Sequence: Synthetic oligonucleotide
cctccctcagcctcccgagt

SEQ ID NO: 4604 - DNA, 20 bp, Artificial Sequence
  Description of Artificial Sequence: Synthetic oligonucleotide
ctccctcagcctcccgagta

SEQ ID NO: 4605 - DNA, 20 bp, Artificial Sequence
  Description of Artificial Sequence: Synthetic oligonucleotide
tccctcagcctcccgagtag

SEQ ID NO: 4606 - DNA, 20 bp, Artificial Sequence
  Description of Artificial Sequence: Synthetic oligonucleotide
ccctcagcctcccgagtagc

SEQ ID NO: 4607 - DNA, 20 bp, Artificial Sequence
  Description of Artificial Sequence: Synthetic oligonucleotide
cctcagcctcccgagtagct

SEQ ID NO: 4608 - DNA, 20 bp, Artificial Sequence
  Description of Artificial Sequence: Synthetic oligonucleotide
ctcagcctcccgagtagctg

SEQ ID NO: 4609 - DNA, 20 bp, Artificial Sequence
  Description of Artificial Sequence: Synthetic oligonucleotide
tcagcctcccgagtagctgg

SEQ ID NO: 4610 - DNA, 20 bp, Artificial Sequence
  Description of Artificial Sequence: Synthetic oligonucleotide
cagcctcccgagtagctggg

SEQ ID NO: 4611 - DNA, 20 bp, Artificial Sequence
  Description of Artificial Sequence: Synthetic oligonucleotide
agcctcccgagtagctggga

SEQ ID NO: 4612 - DNA, 20 bp, Artificial Sequence
  Description of Artificial Sequence: Synthetic oligonucleotide
gcctcccgagtagctgggat

SEQ ID NO: 4613 - DNA, 20 bp, Artificial Sequence
  Description of Artificial Sequence: Synthetic oligonucleotide
cctcccgagtagctgggatt

SEQ ID NO: 4614 - DNA, 20 bp, Artificial Sequence
  Description of Artificial Sequence: Synthetic oligonucleotide
ctcccgagtagctgggatta

SEQ ID NO: 4615 - DNA, 20 bp, Artificial Sequence
  Description of Artificial Sequence: Synthetic oligonucleotide
tcccgagtagctgggattac

SEQ ID NO: 4616 - DNA, 20 bp, Artificial Sequence
  Description of Artificial Sequence: Synthetic oligonucleotide
cccgagtagctgggattaca

SEQ ID NO: 4617 - DNA, 20 bp, Artificial Sequence
  Description of Artificial Sequence: Synthetic oligonucleotide
ccgagtagctgggattacag

SEQ ID NO: 4618 - DNA, 20 bp, Artificial Sequence
  Description of Artificial Sequence: Synthetic oligonucleotide
cgagtagctgggattacagg

SEQ ID NO: 4619 - DNA, 20 bp, Artificial Sequence
  Description of Artificial Sequence: Synthetic oligonucleotide
gagtagctgggattacaggc

SEQ ID NO: 4620 - DNA, 20 bp, Artificial Sequence
  Description of Artificial Sequence: Synthetic oligonucleotide
agtagctgggattacaggcg

SEQ ID NO: 4621 - DNA, 20 bp, Artificial Sequence
  Description of Artificial Sequence: Synthetic oligonucleotide
gtagctgggattacaggcgc

SEQ ID NO: 4622 - DNA, 20 bp, Artificial Sequence
  Description of Artificial Sequence: Synthetic oligonucleotide
tagctgggattacaggcgcc

SEQ ID NO: 4623 - DNA, 20 bp, Artificial Sequence
  Description of Artificial Sequence: Synthetic oligonucleotide
agctgggattacaggcgcct

SEQ ID NO: 4624 - DNA, 20 bp, Artificial Sequence
  Description of Artificial Sequence: Synthetic oligonucleotide
gctgggattacaggcgcctg

SEQ ID NO: 4625 - DNA, 20 bp, Artificial Sequence
  Description of Artificial Sequence: Synthetic oligonucleotide
ctgggattacaggcgcctgc

SEQ ID NO: 4626 - DNA, 20 bp, Artificial Sequence
  Description of Artificial Sequence: Synthetic oligonucleotide
tgggattacaggcgcctgcc

SEQ ID NO: 4627 - DNA, 20 bp, Artificial Sequence
  Description of Artificial Sequence: Synthetic oligonucleotide
gggattacaggcgcctgcca

SEQ ID NO: 4628 - DNA, 20 bp, Artificial Sequence
  Description of Artificial Sequence: Synthetic oligonucleotide
ggattacaggcgcctgccac

SEQ ID NO: 4629 - DNA, 20 bp, Artificial Sequence
  Description of Artificial Sequence: Synthetic oligonucleotide
gattacaggcgcctgccacc

SEQ ID NO: 4630 - DNA, 20 bp, Artificial Sequence
  Description of Artificial Sequence: Synthetic oligonucleotide
attacaggcgcctgccacca

SEQ ID NO: 4631 - DNA, 20 bp, Artificial Sequence
  Description of Artificial Sequence: Synthetic oligonucleotide
ttacaggcgcctgccaccac

SEQ ID NO: 4632 - DNA, 20 bp, Artificial Sequence
  Description of Artificial Sequence: Synthetic oligonucleotide
tacaggcgcctgccaccaca

SEQ ID NO: 4633 - DNA, 20 bp, Artificial Sequence
  Description of Artificial Sequence: Synthetic oligonucleotide
acaggcgcctgccaccacac

SEQ ID NO: 4634 - DNA, 20 bp, Artificial Sequence
  Description of Artificial Sequence: Synthetic oligonucleotide
caggcgcctgccaccacacc

SEQ ID NO: 4635 - DNA, 20 bp, Artificial Sequence
  Description of Artificial Sequence: Synthetic oligonucleotide
aggcgcctgccaccacacct

SEQ ID NO: 4636 - DNA, 20 bp, Artificial Sequence
  Description of Artificial Sequence: Synthetic oligonucleotide
ggcgcctgccaccacacctg

SEQ ID NO: 4637 - DNA, 20 bp, Artificial Sequence
  Description of Artificial Sequence: Synthetic oligonucleotide
gcgcctgccaccacacctgg

SEQ ID NO: 4638 - DNA, 20 bp, Artificial Sequence
  Description of Artificial Sequence: Synthetic oligonucleotide
cgcctgccaccacacctggc

SEQ ID NO: 4639 - DNA, 20 bp, Artificial Sequence
  Description of Artificial Sequence: Synthetic oligonucleotide
gcctgccaccacacctggct

SEQ ID NO: 4640 - DNA, 20 bp, Artificial Sequence
  Description of Artificial Sequence: Synthetic oligonucleotide
cctgccaccacacctggcta

SEQ ID NO: 4641 - DNA, 20 bp, Artificial Sequence
  Description of Artificial Sequence: Synthetic oligonucleotide
ctgccaccacacctggctaa

SEQ ID NO: 4642 - DNA, 20 bp, Artificial Sequence
  Description of Artificial Sequence: Synthetic oligonucleotide
tgccaccacacctggctaat

SEQ ID NO: 4643 - DNA, 20 bp, Artificial Sequence
  Description of Artificial Sequence: Synthetic oligonucleotide
gccaccacacctggctaatt

SEQ ID NO: 4644 - DNA, 20 bp, Artificial Sequence
  Description of Artificial Sequence: Synthetic oligonucleotide
ccaccacacctggctaattt

SEQ ID NO: 4645 - DNA, 20 bp, Artificial Sequence
  Description of Artificial Sequence: Synthetic oligonucleotide
caccacacctggctaatttt

SEQ ID NO: 4646 - DNA, 20 bp, Artificial Sequence
  Description of Artificial Sequence: Synthetic oligonucleotide
accacacctggctaattttt

SEQ ID NO: 4647 - DNA, 20 bp, Artificial Sequence
  Description of Artificial Sequence: Synthetic oligonucleotide
ccacacctggctaatttttg

SEQ ID NO: 4648 - DNA, 20 bp, Artificial Sequence
  Description of Artificial Sequence: Synthetic oligonucleotide
cacacctggctaatttttgg

SEQ ID NO: 4649 - DNA, 20 bp, Artificial Sequence
  Description of Artificial Sequence: Synthetic oligonucleotide
acacctggctaatttttggt

SEQ ID NO: 4650 - DNA, 20 bp, Artificial Sequence
  Description of Artificial Sequence: Synthetic oligonucleotide
cacctggctaatttttggtc

SEQ ID NO: 4651 - DNA, 20 bp, Artificial Sequence
  Description of Artificial Sequence: Synthetic oligonucleotide
acctggctaatttttggtct

SEQ ID NO: 4652 - DNA, 20 bp, Artificial Sequence
  Description of Artificial Sequence: Synthetic oligonucleotide
cctggctaatttttggtctt

SEQ ID NO: 4653 - DNA, 20 bp, Artificial Sequence
  Description of Artificial Sequence: Synthetic oligonucleotide
ctggctaatttttggtcttt

SEQ ID NO: 4654 - DNA, 20 bp, Artificial Sequence
  Description of Artificial Sequence: Synthetic oligonucleotide
tggctaatttttggtctttt

SEQ ID NO: 4655 - DNA, 20 bp, Artificial Sequence
  Description of Artificial Sequence: Synthetic oligonucleotide
ggctaatttttggtcttttt

SEQ ID NO: 4656 - DNA, 20 bp, Artificial Sequence
  Description of Artificial Sequence: Synthetic oligonucleotide
gctaatttttggtctttttt

SEQ ID NO: 4657 - DNA, 20 bp, Artificial Sequence
  Description of Artificial Sequence: Synthetic oligonucleotide
ctaatttttggtcttttttt

SEQ ID NO: 4658 - DNA, 20 bp, Artificial Sequence
  Description of Artificial Sequence: Synthetic oligonucleotide
taatttttggtctttttttt

SEQ ID NO: 4659 - DNA, 20 bp, Artificial Sequence
  Description of Artificial Sequence: Synthetic oligonucleotide
aatttttggtcttttttttt

SEQ ID NO: 4660 - DNA, 20 bp, Artificial Sequence
  Description of Artificial Sequence: Synthetic oligonucleotide
atttttggtctttttttttg

SEQ ID NO: 4661 - DNA, 20 bp, Artificial Sequence
  Description of Artificial Sequence: Synthetic oligonucleotide
tttttggtctttttttttga

SEQ ID NO: 4662 - DNA, 20 bp, Artificial Sequence
  Description of Artificial Sequence: Synthetic oligonucleotide
ttttggtctttttttttgag

SEQ ID NO: 4663 - DNA, 20 bp, Artificial Sequence
  Description of Artificial Sequence: Synthetic oligonucleotide
tttggtctttttttttgaga

SEQ ID NO: 4664 - DNA, 20 bp, Artificial Sequence
  Description of Artificial Sequence: Synthetic oligonucleotide
ttggtctttttttttgagac

SEQ ID NO: 4665 - DNA, 20 bp, Artificial Sequence
  Description of Artificial Sequence: Synthetic oligonucleotide
tggtctttttttttgagact

SEQ ID NO: 4666 - DNA, 20 bp, Artificial Sequence
  Description of Artificial Sequence: Synthetic oligonucleotide
ggtctttttttttgagactg

SEQ ID NO: 4667 - DNA, 20 bp, Artificial Sequence
  Description of Artificial Sequence: Synthetic oligonucleotide
gtctttttttttgagactga

SEQ ID NO: 4668 - DNA, 20 bp, Artificial Sequence
  Description of Artificial Sequence: Synthetic oligonucleotide
tctttttttttgagactgag

SEQ ID NO: 4669 - DNA, 20 bp, Artificial Sequence
  Description of Artificial Sequence: Synthetic oligonucleotide
ctttttttttgagactgagt

SEQ ID NO: 4670 - DNA, 20 bp, Artificial Sequence
  Description of Artificial Sequence: Synthetic oligonucleotide
tttttttttgagactgagtc

SEQ ID NO: 4671 - DNA, 20 bp, Artificial Sequence
  Description of Artificial Sequence: Synthetic oligonucleotide
ttttttttgagactgagtct

SEQ ID NO: 4672 - DNA, 20 bp, Artificial Sequence
  Description of Artificial Sequence: Synthetic oligonucleotide
tttttttgagactgagtctc

SEQ ID NO: 4673 - DNA, 20 bp, Artificial Sequence
  Description of Artificial Sequence: Synthetic oligonucleotide
ttttttgagactgagtctca

SEQ ID NO: 4674 - DNA, 20 bp, Artificial Sequence
  Description of Artificial Sequence: Synthetic oligonucleotide
tttttgagactgagtctcac

SEQ ID NO: 4675 - DNA, 20 bp, Artificial Sequence
  Description of Artificial Sequence: Synthetic oligonucleotide
ttttgagactgagtctcact

SEQ ID NO: 4676 - DNA, 20 bp, Artificial Sequence
  Description of Artificial Sequence: Synthetic oligonucleotide
tttgagactgagtctcactc

SEQ ID NO: 4677 - DNA, 20 bp, Artificial Sequence
  Description of Artificial Sequence: Synthetic oligonucleotide
ttgagactgagtctcactct

SEQ ID NO: 4678 - DNA, 20 bp, Artificial Sequence
  Description of Artificial Sequence: Synthetic oligonucleotide
tgagactgagtctcactcta

SEQ ID NO: 4679 - DNA, 20 bp, Artificial Sequence
  Description of Artificial Sequence: Synthetic oligonucleotide
gagactgagtctcactctat

SEQ ID NO: 4680 - DNA, 20 bp, Artificial Sequence
  Description of Artificial Sequence: Synthetic oligonucleotide
agactgagtctcactctatc

SEQ ID NO: 4681 - DNA, 20 bp, Artificial Sequence
  Description of Artificial Sequence: Synthetic oligonucleotide
gactgagtctcactctatct

SEQ ID NO: 4682 - DNA, 20 bp, Artificial Sequence
  Description of Artificial Sequence: Synthetic oligonucleotide
actgagtctcactctatctc

SEQ ID NO: 4683 - DNA, 20 bp, Artificial Sequence
  Description of Artificial Sequence: Synthetic oligonucleotide
ctgagtctcactctatctcc

SEQ ID NO: 4684 - DNA, 20 bp, Artificial Sequence
  Description of Artificial Sequence: Synthetic oligonucleotide
tgagtctcactctatctccc

SEQ ID NO: 4685 - DNA, 20 bp, Artificial Sequence
  Description of Artificial Sequence: Synthetic oligonucleotide
gagtctcactctatctccca

SEQ ID NO: 4686 - DNA, 20 bp, Artificial Sequence
  Description of Artificial Sequence: Synthetic oligonucleotide
agtctcactctatctcccag

SEQ ID NO: 4687 - DNA, 20 bp, Artificial Sequence
  Description of Artificial Sequence: Synthetic oligonucleotide
gtctcactctatctcccagg

SEQ ID NO: 4688 - DNA, 20 bp, Artificial Sequence
  Description of Artificial Sequence: Synthetic oligonucleotide
tctcactctatctcccaggc

SEQ ID NO: 4689 - DNA, 20 bp, Artificial Sequence
  Description of Artificial Sequence: Synthetic oligonucleotide
ctcactctatctcccaggct

SEQ ID NO: 4690 - DNA, 20 bp, Artificial Sequence
  Description of Artificial Sequence: Synthetic oligonucleotide
tcactctatctcccaggctg

SEQ ID NO: 4691 - DNA, 20 bp, Artificial Sequence
  Description of Artificial Sequence: Synthetic oligonucleotide
cactctatctcccaggctgg

SEQ ID NO: 4692 - DNA, 20 bp, Artificial Sequence
  Description of Artificial Sequence: Synthetic oligonucleotide
actctatctcccaggctgga

SEQ ID NO: 4693 - DNA, 20 bp, Artificial Sequence
  Description of Artificial Sequence: Synthetic oligonucleotide
ctctatctcccaggctggag

SEQ ID NO: 4694 - DNA, 20 bp, Artificial Sequence
  Description of Artificial Sequence: Synthetic oligonucleotide
tctatctcccaggctggagt

SEQ ID NO: 4695 - DNA, 20 bp, Artificial Sequence
  Description of Artificial Sequence: Synthetic oligonucleotide
ctatctcccaggctggagtg

SEQ ID NO: 4696 - DNA, 20 bp, Artificial Sequence
  Description of Artificial Sequence: Synthetic oligonucleotide
tatctcccaggctggagtgc

SEQ ID NO: 4697 - DNA, 20 bp, Artificial Sequence
  Description of Artificial Sequence: Synthetic oligonucleotide
atctcccaggctggagtgca

SEQ ID NO: 4698 - DNA, 20 bp, Artificial Sequence
  Description of Artificial Sequence: Synthetic oligonucleotide
tctcccaggctggagtgcag

SEQ ID NO: 4699 - DNA, 20 bp, Artificial Sequence
  Description of Artificial Sequence: Synthetic oligonucleotide
ctcccaggctggagtgcagt

SEQ ID NO: 4700 - DNA, 20 bp, Artificial Sequence
  Description of Artificial Sequence: Synthetic oligonucleotide
tcccaggctggagtgcagtg

SEQ ID NO: 4701 - DNA, 20 bp, Artificial Sequence
  Description of Artificial Sequence: Synthetic oligonucleotide
cccaggctggagtgcagtgg

SEQ ID NO: 4702 - DNA, 20 bp, Artificial Sequence
  Description of Artificial Sequence: Synthetic oligonucleotide
ccaggctggagtgcagtggc

SEQ ID NO: 4703 - DNA, 20 bp, Artificial Sequence
  Description of Artificial Sequence: Synthetic oligonucleotide
caggctggagtgcagtggca

SEQ ID NO: 4704 - DNA, 20 bp, Artificial Sequence
  Description of Artificial Sequence: Synthetic oligonucleotide
aggctggagtgcagtggcac

SEQ ID NO: 4705 - DNA, 20 bp, Artificial Sequence
  Description of Artificial Sequence: Synthetic oligonucleotide
ggctggagtgcagtggcaca

SEQ ID NO: 4706 - DNA, 20 bp, Artificial Sequence
  Description of Artificial Sequence: Synthetic oligonucleotide
gctggagtgcagtggcacaa

SEQ ID NO: 4707 - DNA, 20 bp, Artificial Sequence
  Description of Artificial Sequence: Synthetic oligonucleotide
ctggagtgcagtggcacaat

SEQ ID NO: 4708 - DNA, 20 bp, Artificial Sequence
  Description of Artificial Sequence: Synthetic oligonucleotide
tggagtgcagtggcacaatc

SEQ ID NO: 4709 - DNA, 20 bp, Artificial Sequence
  Description of Artificial Sequence: Synthetic oligonucleotide
ggagtgcagtggcacaatct

SEQ ID NO: 4710 - DNA, 20 bp, Artificial Sequence
  Description of Artificial Sequence: Synthetic oligonucleotide
gagtgcagtggcacaatctc

SEQ ID NO: 4711 - DNA, 20 bp, Artificial Sequence
  Description of Artificial Sequence: Synthetic oligonucleotide
agtgcagtggcacaatctcg

SEQ ID NO: 4712 - DNA, 20 bp, Artificial Sequence
  Description of Artificial Sequence: Synthetic oligonucleotide
gtgcagtggcacaatctcgg

SEQ ID NO: 4713 - DNA, 20 bp, Artificial Sequence
  Description of Artificial Sequence: Synthetic oligonucleotide
tgcagtggcacaatctcggc

SEQ ID NO: 4714 - DNA, 20 bp, Artificial Sequence
  Description of Artificial Sequence: Synthetic oligonucleotide
gcagtggcacaatctcggct

SEQ ID NO: 4715 - DNA, 20 bp, Artificial Sequence
  Description of Artificial Sequence: Synthetic oligonucleotide
cagtggcacaatctcggctc

SEQ ID NO: 4716 - DNA, 20 bp, Artificial Sequence
  Description of Artificial Sequence: Synthetic oligonucleotide
agtggcacaatctcggctca

SEQ ID NO: 4717 - DNA, 20 bp, Artificial Sequence
  Description of Artificial Sequence: Synthetic oligonucleotide
gtggcacaatctcggctcac

SEQ ID NO: 4718 - DNA, 20 bp, Artificial Sequence
  Description of Artificial Sequence: Synthetic oligonucleotide
tggcacaatctcggctcact

SEQ ID NO: 4719 - DNA, 20 bp, Artificial Sequence
  Description of Artificial Sequence: Synthetic oligonucleotide
ggcacaatctcggctcactg

SEQ ID NO: 4720 - DNA, 20 bp, Artificial Sequence
  Description of Artificial Sequence: Synthetic oligonucleotide
gcacaatctcggctcactgc

SEQ ID NO: 4721 - DNA, 20 bp, Artificial Sequence
  Description of Artificial Sequence: Synthetic oligonucleotide
cacaatctcggctcactgca

SEQ ID NO: 4722 - DNA, 20 bp, Artificial Sequence
  Description of Artificial Sequence: Synthetic oligonucleotide
acaatctcggctcactgcac

SEQ ID NO: 4723 - DNA, 20 bp, Artificial Sequence
  Description of Artificial Sequence: Synthetic oligonucleotide
caatctcggctcactgcacc

SEQ ID NO: 4724 - DNA, 20 bp, Artificial Sequence
  Description of Artificial Sequence: Synthetic oligonucleotide
aatctcggctcactgcacct

SEQ ID NO: 4725 - DNA, 20 bp, Artificial Sequence
  Description of Artificial Sequence: Synthetic oligonucleotide
atctcggctcactgcacctc

SEQ ID NO: 4726 - DNA, 20 bp, Artificial Sequence
  Description of Artificial Sequence: Synthetic oligonucleotide
tctcggctcactgcacctct

SEQ ID NO: 4727 - DNA, 20 bp, Artificial Sequence
  Description of Artificial Sequence: Synthetic oligonucleotide
ctcggctcactgcacctctg

SEQ ID NO: 4728 - DNA, 20 bp, Artificial Sequence
  Description of Artificial Sequence: Synthetic oligonucleotide
tcggctcactgcacctctgc

SEQ ID NO: 4729 - DNA, 20 bp, Artificial Sequence
  Description of Artificial Sequence: Synthetic oligonucleotide
cggctcactgcacctctgcc

SEQ ID NO: 4730 - DNA, 20 bp, Artificial Sequence
  Description of Artificial Sequence: Synthetic oligonucleotide
ggctcactgcacctctgcct

SEQ ID NO: 4731 - DNA, 20 bp, Artificial Sequence
  Description of Artificial Sequence: Synthetic oligonucleotide
gctcactgcacctctgcctc

SEQ ID NO: 4732 - DNA, 20 bp, Artificial Sequence
  Description of Artificial Sequence: Synthetic oligonucleotide
ctcactgcacctctgcctcc

SEQ ID NO: 4733 - DNA, 20 bp, Artificial Sequence
  Description of Artificial Sequence: Synthetic oligonucleotide
tcactgcacctctgcctccc

SEQ ID NO: 4734 - DNA, 20 bp, Artificial Sequence
  Description of Artificial Sequence: Synthetic oligonucleotide
cactgcacctctgcctccca

SEQ ID NO: 4735 - DNA, 20 bp, Artificial Sequence
  Description of Artificial Sequence: Synthetic oligonucleotide
actgcacctctgcctcccag

SEQ ID NO: 4736 - DNA, 20 bp, Artificial Sequence
  Description of Artificial Sequence: Synthetic oligonucleotide
ctgcacctctgcctcccagg

SEQ ID NO: 4737 - DNA, 20 bp, Artificial Sequence
  Description of Artificial Sequence: Synthetic oligonucleotide
tgcacctctgcctcccaggt

SEQ ID NO: 4738 - DNA, 20 bp, Artificial Sequence
  Description of Artificial Sequence: Synthetic oligonucleotide
gcacctctgcctcccaggtt

SEQ ID NO: 4739 - DNA, 20 bp, Artificial Sequence
  Description of Artificial Sequence: Synthetic oligonucleotide
cacctctgcctcccaggttc

SEQ ID NO: 4740 - DNA, 20 bp, Artificial Sequence
  Description of Artificial Sequence: Synthetic oligonucleotide
acctctgcctcccaggttca

SEQ ID NO: 4741 - DNA, 20 bp, Artificial Sequence
  Description of Artificial Sequence: Synthetic oligonucleotide
cctctgcctcccaggttcaa

SEQ ID NO: 4742 - DNA, 20 bp, Artificial Sequence
  Description of Artificial Sequence: Synthetic oligonucleotide
ctctgcctcccaggttcaag

SEQ ID NO: 4743 - DNA, 20 bp, Artificial Sequence
  Description of Artificial Sequence: Synthetic oligonucleotide
tctgcctcccaggttcaagg

SEQ ID NO: 4744 - DNA, 20 bp, Artificial Sequence
  Description of Artificial Sequence: Synthetic oligonucleotide
ctgcctcccaggttcaaggg

SEQ ID NO: 4745 - DNA, 20 bp, Artificial Sequence
  Description of Artificial Sequence: Synthetic oligonucleotide
tgcctcccaggttcaaggga

SEQ ID NO: 4746 - DNA, 20 bp, Artificial Sequence
  Description of Artificial Sequence: Synthetic oligonucleotide
gcctcccaggttcaagggat

SEQ ID NO: 4747 - DNA, 20 bp, Artificial Sequence
  Description of Artificial Sequence: Synthetic oligonucleotide
cctcccaggttcaagggatt

SEQ ID NO: 4748 - DNA, 20 bp, Artificial Sequence
  Description of Artificial Sequence: Synthetic oligonucleotide
ctcccaggttcaagggattc

SEQ ID NO: 4749 - DNA, 20 bp, Artificial Sequence
  Description of Artificial Sequence: Synthetic oligonucleotide
tcccaggttcaagggattct

SEQ ID NO: 4750 - DNA, 20 bp, Artificial Sequence
  Description of Artificial Sequence: Synthetic oligonucleotide
cccaggttcaagggattctc

SEQ ID NO: 4751 - DNA, 20 bp, Artificial Sequence
  Description of Artificial Sequence: Synthetic oligonucleotide
ccaggttcaagggattctca

SEQ ID NO: 4752 - DNA, 20 bp, Artificial Sequence
  Description of Artificial Sequence: Synthetic oligonucleotide
caggttcaagggattctcat

SEQ ID NO: 4753 - DNA, 20 bp, Artificial Sequence
  Description of Artificial Sequence: Synthetic oligonucleotide
aggttcaagggattctcatg

SEQ ID NO: 4754 - DNA, 20 bp, Artificial Sequence
  Description of Artificial Sequence: Synthetic oligonucleotide
ggttcaagggattctcatgc

SEQ ID NO: 4755 - DNA, 20 bp, Artificial Sequence
  Description of Artificial Sequence: Synthetic oligonucleotide
gttcaagggattctcatgcc

SEQ ID NO: 4756 - DNA, 20 bp, Artificial Sequence
  Description of Artificial Sequence: Synthetic oligonucleotide
ttcaagggattctcatgcct

SEQ ID NO: 4757 - DNA, 20 bp, Artificial Sequence
  Description of Artificial Sequence: Synthetic oligonucleotide
tcaagggattctcatgcctc

SEQ ID NO: 4758 - DNA, 20 bp, Artificial Sequence
  Description of Artificial Sequence: Synthetic oligonucleotide
caagggattctcatgcctca

SEQ ID NO: 4759 - DNA, 20 bp, Artificial Sequence
  Description of Artificial Sequence: Synthetic oligonucleotide
aagggattctcatgcctcag

SEQ ID NO: 4760 - DNA, 20 bp, Artificial Sequence
  Description of Artificial Sequence: Synthetic oligonucleotide
agggattctcatgcctcagc

SEQ ID NO: 4761 - DNA, 20 bp, Artificial Sequence
  Description of Artificial Sequence: Synthetic oligonucleotide
gggattctcatgcctcagcc

SEQ ID NO: 4762 - DNA, 20 bp, Artificial Sequence
  Description of Artificial Sequence: Synthetic oligonucleotide
ggattctcatgcctcagcct

SEQ ID NO: 4763 - DNA, 20 bp, Artificial Sequence
  Description of Artificial Sequence: Synthetic oligonucleotide
gattctcatgcctcagcctc

SEQ ID NO: 4764 - DNA, 20 bp, Artificial Sequence
  Description of Artificial Sequence: Synthetic oligonucleotide
attctcatgcctcagcctcc

SEQ ID NO: 4765 - DNA, 20 bp, Artificial Sequence
  Description of Artificial Sequence: Synthetic oligonucleotide
ttctcatgcctcagcctcct

SEQ ID NO: 4766 - DNA, 20 bp, Artificial Sequence
  Description of Artificial Sequence: Synthetic oligonucleotide
tctcatgcctcagcctcctg

SEQ ID NO: 4767 - DNA, 20 bp, Artificial Sequence
  Description of Artificial Sequence: Synthetic oligonucleotide
ctcatgcctcagcctcctga

SEQ ID NO: 4768 - DNA, 20 bp, Artificial Sequence
  Description of Artificial Sequence: Synthetic oligonucleotide
tcatgcctcagcctcctgag

SEQ ID NO: 4769 - DNA, 20 bp, Artificial Sequence
  Description of Artificial Sequence: Synthetic oligonucleotide
catgcctcagcctcctgagt

SEQ ID NO: 4770 - DNA, 20 bp, Artificial Sequence
  Description of Artificial Sequence: Synthetic oligonucleotide
atgcctcagcctcctgagta

SEQ ID NO: 4771 - DNA, 20 bp, Artificial Sequence
  Description of Artificial Sequence: Synthetic oligonucleotide
tgcctcagcctcctgagtag

SEQ ID NO: 4772 - DNA, 20 bp, Artificial Sequence
  Description of Artificial Sequence: Synthetic oligonucleotide
gcctcagcctcctgagtagc

SEQ ID NO: 4773 - DNA, 20 bp, Artificial Sequence
  Description of Artificial Sequence: Synthetic oligonucleotide
cctcagcctcctgagtagcc

SEQ ID NO: 4774 - DNA, 20 bp, Artificial Sequence
  Description of Artificial Sequence: Synthetic oligonucleotide
ctcagcctcctgagtagccg

SEQ ID NO: 4775 - DNA, 20 bp, Artificial Sequence
  Description of Artificial Sequence: Synthetic oligonucleotide
tcagcctcctgagtagccgg

SEQ ID NO: 4776 - DNA, 20 bp, Artificial Sequence
  Description of Artificial Sequence: Synthetic oligonucleotide
cagcctcctgagtagccggg

SEQ ID NO: 4777 - DNA, 20 bp, Artificial Sequence
  Description of Artificial Sequence: Synthetic oligonucleotide
agcctcctgagtagccggga

SEQ ID NO: 4778 - DNA, 20 bp, Artificial Sequence
  Description of Artificial Sequence: Synthetic oligonucleotide
gcctcctgagtagccgggat

SEQ ID NO: 4779 - DNA, 20 bp, Artificial Sequence
  Description of Artificial Sequence: Synthetic oligonucleotide
cctcctgagtagccgggatt

SEQ ID NO: 4780 - DNA, 20 bp, Artificial Sequence
  Description of Artificial Sequence: Synthetic oligonucleotide
ctcctgagtagccgggatta

SEQ ID NO: 4781 - DNA, 20 bp, Artificial Sequence
  Description of Artificial Sequence: Synthetic oligonucleotide
tcctgagtagccgggattac

SEQ ID NO: 4782 - DNA, 20 bp, Artificial Sequence
  Description of Artificial Sequence: Synthetic oligonucleotide
cctgagtagccgggattaca

SEQ ID NO: 4783 - DNA, 20 bp, Artificial Sequence
  Description of Artificial Sequence: Synthetic oligonucleotide
ctgagtagccgggattacag

SEQ ID NO: 4784 - DNA, 20 bp, Artificial Sequence
  Description of Artificial Sequence: Synthetic oligonucleotide
tgagtagccgggattacagg

SEQ ID NO: 4785 - DNA, 20 bp, Artificial Sequence
  Description of Artificial Sequence: Synthetic oligonucleotide
gagtagccgggattacaggc

SEQ ID NO: 4786 - DNA, 20 bp, Artificial Sequence
  Description of Artificial Sequence: Synthetic oligonucleotide
agtagccgggattacaggca

SEQ ID NO: 4787 - DNA, 20 bp, Artificial Sequence
  Description of Artificial Sequence: Synthetic oligonucleotide
gtagccgggattacaggcac

SEQ ID NO: 4788 - DNA, 20 bp, Artificial Sequence
  Description of Artificial Sequence: Synthetic oligonucleotide
tagccgggattacaggcacc

SEQ ID NO: 4789 - DNA, 20 bp, Artificial Sequence
  Description of Artificial Sequence: Synthetic oligonucleotide
agccgggattacaggcaccc

SEQ ID NO: 4790 - DNA, 20 bp, Artificial Sequence
  Description of Artificial Sequence: Synthetic oligonucleotide
gccgggattacaggcacccg

SEQ ID NO: 4791 - DNA, 20 bp, Artificial Sequence
  Description of Artificial Sequence: Synthetic oligonucleotide
ccgggattacaggcacccgc

SEQ ID NO: 4792 - DNA, 20 bp, Artificial Sequence
  Description of Artificial Sequence: Synthetic oligonucleotide
cgggattacaggcacccgcc

SEQ ID NO: 4793 - DNA, 20 bp, Artificial Sequence
  Description of Artificial Sequence: Synthetic oligonucleotide
gggattacaggcacccgcca

SEQ ID NO: 4794 - DNA, 20 bp, Artificial Sequence
  Description of Artificial Sequence: Synthetic oligonucleotide
ggattacaggcacccgccac

SEQ ID NO: 4795 - DNA, 20 bp, Artificial Sequence
  Description of Artificial Sequence: Synthetic oligonucleotide
gattacaggcacccgccacc

SEQ ID NO: 4796 - DNA, 20 bp, Artificial Sequence
  Description of Artificial Sequence: Synthetic oligonucleotide
attacaggcacccgccacca

SEQ ID NO: 4797 - DNA, 20 bp, Artificial Sequence
  Description of Artificial Sequence: Synthetic oligonucleotide
ttacaggcacccgccaccac

SEQ ID NO: 4798 - DNA, 20 bp, Artificial Sequence
  Description of Artificial Sequence: Synthetic oligonucleotide
tacaggcacccgccaccacg

SEQ ID NO: 4799 - DNA, 20 bp, Artificial Sequence
  Description of Artificial Sequence: Synthetic oligonucleotide
acaggcacccgccaccacgc

SEQ ID NO: 4800 - DNA, 20 bp, Artificial Sequence
  Description of Artificial Sequence: Synthetic oligonucleotide
caggcacccgccaccacgcc

SEQ ID NO: 4801 - DNA, 20 bp, Artificial Sequence
  Description of Artificial Sequence: Synthetic oligonucleotide
aggcacccgccaccacgcct

SEQ ID NO: 4802 - DNA, 20 bp, Artificial Sequence
  Description of Artificial Sequence: Synthetic oligonucleotide
ggcacccgccaccacgcctg

SEQ ID NO: 4803 - DNA, 20 bp, Artificial Sequence
  Description of Artificial Sequence: Synthetic oligonucleotide
gcacccgccaccacgcctgg

SEQ ID NO: 4804 - DNA, 20 bp, Artificial Sequence
  Description of Artificial Sequence: Synthetic oligonucleotide
cacccgccaccacgcctggc

SEQ ID NO: 4805 - DNA, 20 bp, Artificial Sequence
  Description of Artificial Sequence: Synthetic oligonucleotide
acccgccaccacgcctggct

SEQ ID NO: 4806 - DNA, 20 bp, Artificial Sequence
  Description of Artificial Sequence: Synthetic oligonucleotide
cccgccaccacgcctggcta

SEQ ID NO: 4807 - DNA, 20 bp, Artificial Sequence
  Description of Artificial Sequence: Synthetic oligonucleotide
ccgccaccacgcctggctag

SEQ ID NO: 4808 - DNA, 20 bp, Artificial Sequence
  Description of Artificial Sequence: Synthetic oligonucleotide
cgccaccacgcctggctagt

SEQ ID NO: 4809 - DNA, 20 bp, Artificial Sequence
  Description of Artificial Sequence: Synthetic oligonucleotide
gccaccacgcctggctagtt

SEQ ID NO: 4810 - DNA, 20 bp, Artificial Sequence
  Description of Artificial Sequence: Synthetic oligonucleotide
ccaccacgcctggctagttt

SEQ ID NO: 4811 - DNA, 20 bp, Artificial Sequence
  Description of Artificial Sequence: Synthetic oligonucleotide
caccacgcctggctagtttt

SEQ ID NO: 4812 - DNA, 20 bp, Artificial Sequence
  Description of Artificial Sequence: Synthetic oligonucleotide
accacgcctggctagttttt

SEQ ID NO: 4813 - DNA, 20 bp, Artificial Sequence
  Description of Artificial Sequence: Synthetic oligonucleotide
ccacgcctggctagtttttg

SEQ ID NO: 4814 - DNA, 20 bp, Artificial Sequence
  Description of Artificial Sequence: Synthetic oligonucleotide
cacgcctggctagtttttgt

SEQ ID NO: 4815 - DNA, 20 bp, Artificial Sequence
  Description of Artificial Sequence: Synthetic oligonucleotide
acgcctggctagtttttgta

SEQ ID NO: 4816 - DNA, 20 bp, Artificial Sequence
  Description of Artificial Sequence: Synthetic oligonucleotide
cgcctggctagtttttgtat

SEQ ID NO: 4817 - DNA, 20 bp, Artificial Sequence
  Description of Artificial Sequence: Synthetic oligonucleotide
gcctggctagtttttgtatt

SEQ ID NO: 4818 - DNA, 20 bp, Artificial Sequence
  Description of Artificial Sequence: Synthetic oligonucleotide
cctggctagtttttgtattt

SEQ ID NO: 4819 - DNA, 20 bp, Artificial Sequence
  Description of Artificial Sequence: Synthetic oligonucleotide
ctggctagtttttgtatttt

SEQ ID NO: 4820 - DNA, 20 bp, Artificial Sequence
  Description of Artificial Sequence: Synthetic oligonucleotide
tggctagtttttgtattttt

SEQ ID NO: 4821 - DNA, 20 bp, Artificial Sequence
  Description of Artificial Sequence: Synthetic oligonucleotide
ggctagtttttgtattttta

SEQ ID NO: 4822 - DNA, 20 bp, Artificial Sequence
  Description of Artificial Sequence: Synthetic oligonucleotide
gctagtttttgtatttttag

SEQ ID NO: 4823 - DNA, 20 bp, Artificial Sequence
  Description of Artificial Sequence: Synthetic oligonucleotide
ctagtttttgtatttttagt

SEQ ID NO: 4824 - DNA, 20 bp, Artificial Sequence
  Description of Artificial Sequence: Synthetic oligonucleotide
tagtttttgtatttttagta

SEQ ID NO: 4825 - DNA, 20 bp, Artificial Sequence
  Description of Artificial Sequence: Synthetic oligonucleotide
agtttttgtatttttagtag

SEQ ID NO: 4826 - DNA, 20 bp, Artificial Sequence
  Description of Artificial Sequence: Synthetic oligonucleotide
gtttttgtatttttagtagt

SEQ ID NO: 4827 - DNA, 20 bp, Artificial Sequence
  Description of Artificial Sequence: Synthetic oligonucleotide
tttttgtatttttagtagtg

SEQ ID NO: 4828 - DNA, 20 bp, Artificial Sequence
  Description of Artificial Sequence: Synthetic oligonucleotide
ttttgtatttttagtagtga

SEQ ID NO: 4829 - DNA, 20 bp, Artificial Sequence
  Description of Artificial Sequence: Synthetic oligonucleotide
tttgtatttttagtagtgag

SEQ ID NO: 4830 - DNA, 20 bp, Artificial Sequence
  Description of Artificial Sequence: Synthetic oligonucleotide
ttgtatttttagtagtgagg

SEQ ID NO: 4831 - DNA, 20 bp, Artificial Sequence
  Description of Artificial Sequence: Synthetic oligonucleotide
tgtatttttagtagtgaggg

SEQ ID NO: 4832 - DNA, 20 bp, Artificial Sequence
  Description of Artificial Sequence: Synthetic oligonucleotide
gtatttttagtagtgagggg

SEQ ID NO: 4833 - DNA, 20 bp, Artificial Sequence
  Description of Artificial Sequence: Synthetic oligonucleotide
tatttttagtagtgaggggg

SEQ ID NO: 4834 - DNA, 20 bp, Artificial Sequence
  Description of Artificial Sequence: Synthetic oligonucleotide
atttttagtagtgagggggt

SEQ ID NO: 4835 - DNA, 20 bp, Artificial Sequence
  Description of Artificial Sequence: Synthetic oligonucleotide
tttttagtagtgagggggtt

SEQ ID NO: 4836 - DNA, 20 bp, Artificial Sequence
  Description of Artificial Sequence: Synthetic oligonucleotide
ttttagtagtgagggggttt

SEQ ID NO: 4837 - DNA, 20 bp, Artificial Sequence
  Description of Artificial Sequence: Synthetic oligonucleotide
tttagtagtgagggggtttc

SEQ ID NO: 4838 - DNA, 20 bp, Artificial Sequence
  Description of Artificial Sequence: Synthetic oligonucleotide
ttagtagtgagggggtttca

SEQ ID NO: 4839 - DNA, 20 bp, Artificial Sequence
  Description of Artificial Sequence: Synthetic oligonucleotide
tagtagtgagggggtttcac

SEQ ID NO: 4840 - DNA, 20 bp, Artificial Sequence
  Description of Artificial Sequence: Synthetic oligonucleotide
agtagtgagggggtttcacc

SEQ ID NO: 4841 - DNA, 20 bp, Artificial Sequence
  Description of Artificial Sequence: Synthetic oligonucleotide
gtagtgagggggtttcacca

SEQ ID NO: 4842 - DNA, 20 bp, Artificial Sequence
  Description of Artificial Sequence: Synthetic oligonucleotide
tagtgagggggtttcaccat

SEQ ID NO: 4843 - DNA, 20 bp, Artificial Sequence
  Description of Artificial Sequence: Synthetic oligonucleotide
agtgagggggtttcaccatg

SEQ ID NO: 4844 - DNA, 20 bp, Artificial Sequence
  Description of Artificial Sequence: Synthetic oligonucleotide
gtgagggggtttcaccatgt

SEQ ID NO: 4845 - DNA, 20 bp, Artificial Sequence
  Description of Artificial Sequence: Synthetic oligonucleotide
tgagggggtttcaccatgtt

SEQ ID NO: 4846 - DNA, 20 bp, Artificial Sequence
  Description of Artificial Sequence: Synthetic oligonucleotide
gagggggtttcaccatgttg

SEQ ID NO: 4847 - DNA, 20 bp, Artificial Sequence
  Description of Artificial Sequence: Synthetic oligonucleotide
agggggtttcaccatgttgg

SEQ ID NO: 4848 - DNA, 20 bp, Artificial Sequence
  Description of Artificial Sequence: Synthetic oligonucleotide
gggggtttcaccatgttggc

SEQ ID NO: 4849 - DNA, 20 bp, Artificial Sequence
  Description of Artificial Sequence: Synthetic oligonucleotide
ggggtttcaccatgttggcc

SEQ ID NO: 4850 - DNA, 20 bp, Artificial Sequence
  Description of Artificial Sequence: Synthetic oligonucleotide
gggtttcaccatgttggcca

SEQ ID NO: 4851 - DNA, 20 bp, Artificial Sequence
  Description of Artificial Sequence: Synthetic oligonucleotide
ggtttcaccatgttggccag

SEQ ID NO: 4852 - DNA, 20 bp, Artificial Sequence
  Description of Artificial Sequence: Synthetic oligonucleotide
gtttcaccatgttggccagg

SEQ ID NO: 4853 - DNA, 20 bp, Artificial Sequence
  Description of Artificial Sequence: Synthetic oligonucleotide
tttcaccatgttggccaggt

SEQ ID NO: 4854 - DNA, 20 bp, Artificial Sequence
  Description of Artificial Sequence: Synthetic oligonucleotide
ttcaccatgttggccaggtt

SEQ ID NO: 4855 - DNA, 20 bp, Artificial Sequence
  Description of Artificial Sequence: Synthetic oligonucleotide
tcaccatgttggccaggttg

SEQ ID NO: 4856 - DNA, 20 bp, Artificial Sequence
  Description of Artificial Sequence: Synthetic oligonucleotide
caccatgttggccaggttgg

SEQ ID NO: 4857 - DNA, 20 bp, Artificial Sequence
  Description of Artificial Sequence: Synthetic oligonucleotide
accatgttggccaggttggt

SEQ ID NO: 4858 - DNA, 20 bp, Artificial Sequence
  Description of Artificial Sequence: Synthetic oligonucleotide
ccatgttggccaggttggtc

SEQ ID NO: 4859 - DNA, 20 bp, Artificial Sequence
  Description of Artificial Sequence: Synthetic oligonucleotide
catgttggccaggttggtct

SEQ ID NO: 4860 - DNA, 20 bp, Artificial Sequence
  Description of Artificial Sequence: Synthetic oligonucleotide
atgttggccaggttggtctc

SEQ ID NO: 4861 - DNA, 20 bp, Artificial Sequence
  Description of Artificial Sequence: Synthetic oligonucleotide
tgttggccaggttggtctca

SEQ ID NO: 4862 - DNA, 20 bp, Artificial Sequence
  Description of Artificial Sequence: Synthetic oligonucleotide
gttggccaggttggtctcaa

SEQ ID NO: 4863 - DNA, 20 bp, Artificial Sequence
  Description of Artificial Sequence: Synthetic oligonucleotide
ttggccaggttggtctcaaa

SEQ ID NO: 4864 - DNA, 20 bp, Artificial Sequence
  Description of Artificial Sequence: Synthetic oligonucleotide
tggccaggttggtctcaaac

SEQ ID NO: 4865 - DNA, 20 bp, Artificial Sequence
  Description of Artificial Sequence: Synthetic oligonucleotide
ggccaggttggtctcaaact

SEQ ID NO: 4866 - DNA, 20 bp, Artificial Sequence
  Description of Artificial Sequence: Synthetic oligonucleotide
gccaggttggtctcaaactc

SEQ ID NO: 4867 - DNA, 20 bp, Artificial Sequence
  Description of Artificial Sequence: Synthetic oligonucleotide
ccaggttggtctcaaactcc

SEQ ID NO: 4868 - DNA, 20 bp, Artificial Sequence
  Description of Artificial Sequence: Synthetic oligonucleotide
caggttggtctcaaactcct

SEQ ID NO: 4869 - DNA, 20 bp, Artificial Sequence
  Description of Artificial Sequence: Synthetic oligonucleotide
aggttggtctcaaactcctt

SEQ ID NO: 4870 - DNA, 20 bp, Artificial Sequence
  Description of Artificial Sequence: Synthetic oligonucleotide
ggttggtctcaaactcctta

SEQ ID NO: 4871 - DNA, 20 bp, Artificial Sequence
  Description of Artificial Sequence: Synthetic oligonucleotide
gttggtctcaaactccttac

SEQ ID NO: 4872 - DNA, 20 bp, Artificial Sequence
  Description of Artificial Sequence: Synthetic oligonucleotide
ttggtctcaaactccttacc

SEQ ID NO: 4873 - DNA, 20 bp, Artificial Sequence
  Description of Artificial Sequence: Synthetic oligonucleotide
tggtctcaaactccttacct

SEQ ID NO: 4874 - DNA, 20 bp, Artificial Sequence
  Description of Artificial Sequence: Synthetic oligonucleotide
ggtctcaaactccttacctc

SEQ ID NO: 4875 - DNA, 20 bp, Artificial Sequence
  Description of Artificial Sequence: Synthetic oligonucleotide
gtctcaaactccttacctca

SEQ ID NO: 4876 - DNA, 20 bp, Artificial Sequence
  Description of Artificial Sequence: Synthetic oligonucleotide
tctcaaactccttacctcat

SEQ ID NO: 4877 - DNA, 20 bp, Artificial Sequence
  Description of Artificial Sequence: Synthetic oligonucleotide
ctcaaactccttacctcatg

SEQ ID NO: 4878 - DNA, 20 bp, Artificial Sequence
  Description of Artificial Sequence: Synthetic oligonucleotide
tcaaactccttacctcatgt

SEQ ID NO: 4879 - DNA, 20 bp, Artificial Sequence
  Description of Artificial Sequence: Synthetic oligonucleotide
caaactccttacctcatgtg

SEQ ID NO: 4880 - DNA, 20 bp, Artificial Sequence
  Description of Artificial Sequence: Synthetic oligonucleotide
aaactccttacctcatgtga

SEQ ID NO: 4881 - DNA, 20 bp, Artificial Sequence
  Description of Artificial Sequence: Synthetic oligonucleotide
aactccttacctcatgtgat

SEQ ID NO: 4882 - DNA, 20 bp, Artificial Sequence
  Description of Artificial Sequence: Synthetic oligonucleotide
actccttacctcatgtgatc

SEQ ID NO: 4883 - DNA, 20 bp, Artificial Sequence
  Description of Artificial Sequence: Synthetic oligonucleotide
ctccttacctcatgtgatcc

SEQ ID NO: 4884 - DNA, 20 bp, Artificial Sequence
  Description of Artificial Sequence: Synthetic oligonucleotide
tccttacctcatgtgatcca

SEQ ID NO: 4885 - DNA, 20 bp, Artificial Sequence
  Description of Artificial Sequence: Synthetic oligonucleotide
ccttacctcatgtgatccac

SEQ ID NO: 4886 - DNA, 20 bp, Artificial Sequence
  Description of Artificial Sequence: Synthetic oligonucleotide
cttacctcatgtgatccacc

SEQ ID NO: 4887 - DNA, 20 bp, Artificial Sequence
  Description of Artificial Sequence: Synthetic oligonucleotide
ttacctcatgtgatccaccc

SEQ ID NO: 4888 - DNA, 20 bp, Artificial Sequence
  Description of Artificial Sequence: Synthetic oligonucleotide
tacctcatgtgatccaccct

SEQ ID NO: 4889 - DNA, 20 bp, Artificial Sequence
  Description of Artificial Sequence: Synthetic oligonucleotide
acctcatgtgatccaccctc

SEQ ID NO: 4890 - DNA, 20 bp, Artificial Sequence
  Description of Artificial Sequence: Synthetic oligonucleotide
cctcatgtgatccaccctcc

SEQ ID NO: 4891 - DNA, 20 bp, Artificial Sequence
  Description of Artificial Sequence: Synthetic oligonucleotide
ctcatgtgatccaccctcct

SEQ ID NO: 4892 - DNA, 20 bp, Artificial Sequence
  Description of Artificial Sequence: Synthetic oligonucleotide
tcatgtgatccaccctcctc

SEQ ID NO: 4893 - DNA, 20 bp, Artificial Sequence
  Description of Artificial Sequence: Synthetic oligonucleotide
catgtgatccaccctcctca

SEQ ID NO: 4894 - DNA, 20 bp, Artificial Sequence
  Description of Artificial Sequence: Synthetic oligonucleotide
atgtgatccaccctcctcag

SEQ ID NO: 4895 - DNA, 20 bp, Artificial Sequence
  Description of Artificial Sequence: Synthetic oligonucleotide
tgtgatccaccctcctcagc

SEQ ID NO: 4896 - DNA, 20 bp, Artificial Sequence
  Description of Artificial Sequence: Synthetic oligonucleotide
gtgatccaccctcctcagcc

SEQ ID NO: 4897 - DNA, 20 bp, Artificial Sequence
  Description of Artificial Sequence: Synthetic oligonucleotide
tgatccaccctcctcagcct

SEQ ID NO: 4898 - DNA, 20 bp, Artificial Sequence
  Description of Artificial Sequence: Synthetic oligonucleotide
gatccaccctcctcagcctc

SEQ ID NO: 4899 - DNA, 20 bp, Artificial Sequence
  Description of Artificial Sequence: Synthetic oligonucleotide
atccaccctcctcagcctcc

SEQ ID NO: 4900 - DNA, 20 bp, Artificial Sequence
  Description of Artificial Sequence: Synthetic oligonucleotide
tccaccctcctcagcctccc

SEQ ID NO: 4901 - DNA, 20 bp, Artificial Sequence
  Description of Artificial Sequence: Synthetic oligonucleotide
ccaccctcctcagcctccca

SEQ ID NO: 4902 - DNA, 20 bp, Artificial Sequence
  Description of Artificial Sequence: Synthetic oligonucleotide
caccctcctcagcctcccaa

SEQ ID NO: 4903 - DNA, 20 bp, Artificial Sequence
  Description of Artificial Sequence: Synthetic oligonucleotide
accctcctcagcctcccaaa

SEQ ID NO: 4904 - DNA, 20 bp, Artificial Sequence
  Description of Artificial Sequence: Synthetic oligonucleotide
ccctcctcagcctcccaaag

SEQ ID NO: 4905 - DNA, 20 bp, Artificial Sequence
  Description of Artificial Sequence: Synthetic oligonucleotide
cctcctcagcctcccaaagt

SEQ ID NO: 4906 - DNA, 20 bp, Artificial Sequence
  Description of Artificial Sequence: Synthetic oligonucleotide
ctcctcagcctcccaaagtg

SEQ ID NO: 4907 - DNA, 20 bp, Artificial Sequence
  Description of Artificial Sequence: Synthetic oligonucleotide
tcctcagcctcccaaagtgc

SEQ ID NO: 4908 - DNA, 20 bp, Artificial Sequence
  Description of Artificial Sequence: Synthetic oligonucleotide
cctcagcctcccaaagtgct

SEQ ID NO: 4909 - DNA, 20 bp, Artificial Sequence
  Description of Artificial Sequence: Synthetic oligonucleotide
ctcagcctcccaaagtgctg

SEQ ID NO: 4910 - DNA, 20 bp, Artificial Sequence
  Description of Artificial Sequence: Synthetic oligonucleotide
tcagcctcccaaagtgctgg

SEQ ID NO: 4911 - DNA, 20 bp, Artificial Sequence
  Description of Artificial Sequence: Synthetic oligonucleotide
cagcctcccaaagtgctggg

SEQ ID NO: 4912 - DNA, 20 bp, Artificial Sequence
  Description of Artificial Sequence: Synthetic oligonucleotide
agcctcccaaagtgctggga

SEQ ID NO: 4913 - DNA, 20 bp, Artificial Sequence
  Description of Artificial Sequence: Synthetic oligonucleotide
gcctcccaaagtgctgggat

SEQ ID NO: 4914 - DNA, 20 bp, Artificial Sequence
  Description of Artificial Sequence: Synthetic oligonucleotide
cctcccaaagtgctgggatt

SEQ ID NO: 4915 - DNA, 20 bp, Artificial Sequence
  Description of Artificial Sequence: Synthetic oligonucleotide
ctcccaaagtgctgggatta

SEQ ID NO: 4916 - DNA, 20 bp, Artificial Sequence
  Description of Artificial Sequence: Synthetic oligonucleotide
tcccaaagtgctgggattac

SEQ ID NO: 4917 - DNA, 20 bp, Artificial Sequence
  Description of Artificial Sequence: Synthetic oligonucleotide
cccaaagtgctgggattaca

SEQ ID NO: 4918 - DNA, 20 bp, Artificial Sequence
  Description of Artificial Sequence: Synthetic oligonucleotide
ccaaagtgctgggattacag

SEQ ID NO: 4919 - DNA, 20 bp, Artificial Sequence
  Description of Artificial Sequence: Synthetic oligonucleotide
caaagtgctgggattacagg

SEQ ID NO: 4920 - DNA, 20 bp, Artificial Sequence
  Description of Artificial Sequence: Synthetic oligonucleotide
aaagtgctgggattacaggt

SEQ ID NO: 4921 - DNA, 20 bp, Artificial Sequence
  Description of Artificial Sequence: Synthetic oligonucleotide
aagtgctgggattacaggta

SEQ ID NO: 4922 - DNA, 20 bp, Artificial Sequence
  Description of Artificial Sequence: Synthetic oligonucleotide
agtgctgggattacaggtat

SEQ ID NO: 4923 - DNA, 20 bp, Artificial Sequence
  Description of Artificial Sequence: Synthetic oligonucleotide
gtgctgggattacaggtatg

SEQ ID NO: 4924 - DNA, 20 bp, Artificial Sequence
  Description of Artificial Sequence: Synthetic oligonucleotide
tgctgggattacaggtatga

SEQ ID NO: 4925 - DNA, 20 bp, Artificial Sequence
  Description of Artificial Sequence: Synthetic oligonucleotide
gctgggattacaggtatgac

SEQ ID NO: 4926 - DNA, 20 bp, Artificial Sequence
  Description of Artificial Sequence: Synthetic oligonucleotide
ctgggattacaggtatgacc

SEQ ID NO: 4927 - DNA, 20 bp, Artificial Sequence
  Description of Artificial Sequence: Synthetic oligonucleotide
tgggattacaggtatgaccc

SEQ ID NO: 4928 - DNA, 20 bp, Artificial Sequence
  Description of Artificial Sequence: Synthetic oligonucleotide
gggattacaggtatgaccca

SEQ ID NO: 4929 - DNA, 20 bp, Artificial Sequence
  Description of Artificial Sequence: Synthetic oligonucleotide
ggattacaggtatgacccac

SEQ ID NO: 4930 - DNA, 20 bp, Artificial Sequence
  Description of Artificial Sequence: Synthetic oligonucleotide
gattacaggtatgacccact

SEQ ID NO: 4931 - DNA, 20 bp, Artificial Sequence
  Description of Artificial Sequence: Synthetic oligonucleotide
attacaggtatgacccactg

SEQ ID NO: 4932 - DNA, 20 bp, Artificial Sequence
  Description of Artificial Sequence: Synthetic oligonucleotide
ttacaggtatgacccactgc

SEQ ID NO: 4933 - DNA, 20 bp, Artificial Sequence
  Description of Artificial Sequence: Synthetic oligonucleotide
tacaggtatgacccactgcg

SEQ ID NO: 4934 - DNA, 20 bp, Artificial Sequence
  Description of Artificial Sequence: Synthetic oligonucleotide
acaggtatgacccactgcgc

SEQ ID NO: 4935 - DNA, 20 bp, Artificial Sequence
  Description of Artificial Sequence: Synthetic oligonucleotide
caggtatgacccactgcgcc

SEQ ID NO: 4936 - DNA, 20 bp, Artificial Sequence
  Description of Artificial Sequence: Synthetic oligonucleotide
aggtatgacccactgcgcct

SEQ ID NO: 4937 - DNA, 20 bp, Artificial Sequence
  Description of Artificial Sequence: Synthetic oligonucleotide
ggtatgacccactgcgcctg

SEQ ID NO: 4938 - DNA, 20 bp, Artificial Sequence
  Description of Artificial Sequence: Synthetic oligonucleotide
gtatgacccactgcgcctgg

SEQ ID NO: 4939 - DNA, 20 bp, Artificial Sequence
  Description of Artificial Sequence: Synthetic oligonucleotide
tatgacccactgcgcctggc

SEQ ID NO: 4940 - DNA, 20 bp, Artificial Sequence
  Description of Artificial Sequence: Synthetic oligonucleotide
atgacccactgcgcctggcc

SEQ ID NO: 4941 - DNA, 20 bp, Artificial Sequence
  Description of Artificial Sequence: Synthetic oligonucleotide
tgacccactgcgcctggcct

SEQ ID NO: 4942 - DNA, 20 bp, Artificial Sequence
  Description of Artificial Sequence: Synthetic oligonucleotide
gacccactgcgcctggccta

SEQ ID NO: 4943 - DNA, 20 bp, Artificial Sequence
  Description of Artificial Sequence: Synthetic oligonucleotide
acccactgcgcctggcctaa

SEQ ID NO: 4944 - DNA, 20 bp, Artificial Sequence
  Description of Artificial Sequence: Synthetic oligonucleotide
cccactgcgcctggcctaat

SEQ ID NO: 4945 - DNA, 20 bp, Artificial Sequence
  Description of Artificial Sequence: Synthetic oligonucleotide
ccactgcgcctggcctaatt

SEQ ID NO: 4946 - DNA, 20 bp, Artificial Sequence
  Description of Artificial Sequence: Synthetic oligonucleotide
cactgcgcctggcctaattt

SEQ ID NO: 4947 - DNA, 20 bp, Artificial Sequence
  Description of Artificial Sequence: Synthetic oligonucleotide
actgcgcctggcctaatttt

SEQ ID NO: 4948 - DNA, 20 bp, Artificial Sequence
  Description of Artificial Sequence: Synthetic oligonucleotide
ctgcgcctggcctaattttt

SEQ ID NO: 4949 - DNA, 20 bp, Artificial Sequence
  Description of Artificial Sequence: Synthetic oligonucleotide
tgcgcctggcctaatttttg

SEQ ID NO: 4950 - DNA, 20 bp, Artificial Sequence
  Description of Artificial Sequence: Synthetic oligonucleotide
gcgcctggcctaatttttgt

SEQ ID NO: 4951 - DNA, 20 bp, Artificial Sequence
  Description of Artificial Sequence: Synthetic oligonucleotide
cgcctggcctaatttttgta

SEQ ID NO: 4952 - DNA, 20 bp, Artificial Sequence
  Description of Artificial Sequence: Synthetic oligonucleotide
gcctggcctaatttttgtat

SEQ ID NO: 4953 - DNA, 20 bp, Artificial Sequence
  Description of Artificial Sequence: Synthetic oligonucleotide
cctggcctaatttttgtatt

SEQ ID NO: 4954 - DNA, 20 bp, Artificial Sequence
  Description of Artificial Sequence: Synthetic oligonucleotide
ctggcctaatttttgtattt

SEQ ID NO: 4955 - DNA, 20 bp, Artificial Sequence
  Description of Artificial Sequence: Synthetic oligonucleotide
tggcctaatttttgtatttt

SEQ ID NO: 4956 - DNA, 20 bp, Artificial Sequence
  Description of Artificial Sequence: Synthetic oligonucleotide
ggcctaatttttgtattttt

SEQ ID NO: 4957 - DNA, 20 bp, Artificial Sequence
  Description of Artificial Sequence: Synthetic oligonucleotide
gcctaatttttgtattttta

SEQ ID NO: 4958 - DNA, 20 bp, Artificial Sequence
  Description of Artificial Sequence: Synthetic oligonucleotide
cctaatttttgtatttttag

SEQ ID NO: 4959 - DNA, 20 bp, Artificial Sequence
  Description of Artificial Sequence: Synthetic oligonucleotide
ctaatttttgtatttttagt

SEQ ID NO: 4960 - DNA, 20 bp, Artificial Sequence
  Description of Artificial Sequence: Synthetic oligonucleotide
taatttttgtatttttagta

SEQ ID NO: 4961 - DNA, 20 bp, Artificial Sequence
  Description of Artificial Sequence: Synthetic oligonucleotide
aatttttgtatttttagtag

SEQ ID NO: 4962 - DNA, 20 bp, Artificial Sequence
  Description of Artificial Sequence: Synthetic oligonucleotide
atttttgtatttttagtaga

SEQ ID NO: 4963 - DNA, 20 bp, Artificial Sequence
  Description of Artificial Sequence: Synthetic oligonucleotide
tttttgtatttttagtagag

SEQ ID NO: 4964 - DNA, 20 bp, Artificial Sequence
  Description of Artificial Sequence: Synthetic oligonucleotide
ttttgtatttttagtagaga

SEQ ID NO: 4965 - DNA, 20 bp, Artificial Sequence
  Description of Artificial Sequence: Synthetic oligonucleotide
tttgtatttttagtagagac

SEQ ID NO: 4966 - DNA, 20 bp, Artificial Sequence
  Description of Artificial Sequence: Synthetic oligonucleotide
ttgtatttttagtagagaca

SEQ ID NO: 4967 - DNA, 20 bp, Artificial Sequence
  Description of Artificial Sequence: Synthetic oligonucleotide
tgtatttttagtagagacag

SEQ ID NO: 4968 - DNA, 20 bp, Artificial Sequence
  Description of Artificial Sequence: Synthetic oligonucleotide
gtatttttagtagagacagg

SEQ ID NO: 4969 - DNA, 20 bp, Artificial Sequence
  Description of Artificial Sequence: Synthetic oligonucleotide
tatttttagtagagacaggg

SEQ ID NO: 4970 - DNA, 20 bp, Artificial Sequence
  Description of Artificial Sequence: Synthetic oligonucleotide
atttttagtagagacagggt

SEQ ID NO: 4971 - DNA, 20 bp, Artificial Sequence
  Description of Artificial Sequence: Synthetic oligonucleotide
tttttagtagagacagggtt

SEQ ID NO: 4972 - DNA, 20 bp, Artificial Sequence
  Description of Artificial Sequence: Synthetic oligonucleotide
ttttagtagagacagggttt

SEQ ID NO: 4973 - DNA, 20 bp, Artificial Sequence
  Description of Artificial Sequence: Synthetic oligonucleotide
tttagtagagacagggtttc

SEQ ID NO: 4974 - DNA, 20 bp, Artificial Sequence
  Description of Artificial Sequence: Synthetic oligonucleotide
ttagtagagacagggtttca

SEQ ID NO: 4975 - DNA, 20 bp, Artificial Sequence
  Description of Artificial Sequence: Synthetic oligonucleotide
tagtagagacagggtttcac

SEQ ID NO: 4976 - DNA, 20 bp, Artificial Sequence
  Description of Artificial Sequence: Synthetic oligonucleotide
agtagagacagggtttcacc

SEQ ID NO: 4977 - DNA, 20 bp, Artificial Sequence
  Description of Artificial Sequence: Synthetic oligonucleotide
gtagagacagggtttcacca

SEQ ID NO: 4978 - DNA, 20 bp, Artificial Sequence
  Description of Artificial Sequence: Synthetic oligonucleotide
tagagacagggtttcaccat

SEQ ID NO: 4979 - DNA, 20 bp, Artificial Sequence
  Description of Artificial Sequence: Synthetic oligonucleotide
agagacagggtttcaccatg

SEQ ID NO: 4980 - DNA, 20 bp, Artificial Sequence
  Description of Artificial Sequence: Synthetic oligonucleotide
gagacagggtttcaccatgt

SEQ ID NO: 4981 - DNA, 20 bp, Artificial Sequence
  Description of Artificial Sequence: Synthetic oligonucleotide
agacagggtttcaccatgtt

SEQ ID NO: 4982 - DNA, 20 bp, Artificial Sequence
  Description of Artificial Sequence: Synthetic oligonucleotide
gacagggtttcaccatgttg

SEQ ID NO: 4983 - DNA, 20 bp, Artificial Sequence
  Description of Artificial Sequence: Synthetic oligonucleotide
acagggtttcaccatgttgg

SEQ ID NO: 4984 - DNA, 20 bp, Artificial Sequence
  Description of Artificial Sequence: Synthetic oligonucleotide
cagggtttcaccatgttggc

SEQ ID NO: 4985 - DNA, 20 bp, Artificial Sequence
  Description of Artificial Sequence: Synthetic oligonucleotide
agggtttcaccatgttggcc

SEQ ID NO: 4986 - DNA, 20 bp, Artificial Sequence
  Description of Artificial Sequence: Synthetic oligonucleotide
gggtttcaccatgttggcca

SEQ ID NO: 4987 - DNA, 20 bp, Artificial Sequence
  Description of Artificial Sequence: Synthetic oligonucleotide
ggtttcaccatgttggccag

SEQ ID NO: 4988 - DNA, 20 bp, Artificial Sequence
  Description of Artificial Sequence: Synthetic oligonucleotide
gtttcaccatgttggccagg

SEQ ID NO: 4989 - DNA, 20 bp, Artificial Sequence
  Description of Artificial Sequence: Synthetic oligonucleotide
tttcaccatgttggccaggc

SEQ ID NO: 4990 - DNA, 20 bp, Artificial Sequence
  Description of Artificial Sequence: Synthetic oligonucleotide
ttcaccatgttggccaggct

SEQ ID NO: 4991 - DNA, 20 bp, Artificial Sequence
  Description of Artificial Sequence: Synthetic oligonucleotide
tcaccatgttggccaggcta

SEQ ID NO: 4992 - DNA, 20 bp, Artificial Sequence
  Description of Artificial Sequence: Synthetic oligonucleotide
caccatgttggccaggctag

SEQ ID NO: 4993 - DNA, 20 bp, Artificial Sequence
  Description of Artificial Sequence: Synthetic oligonucleotide
accatgttggccaggctagt

SEQ ID NO: 4994 - DNA, 20 bp, Artificial Sequence
  Description of Artificial Sequence: Synthetic oligonucleotide
ccatgttggccaggctagtt

SEQ ID NO: 4995 - DNA, 20 bp, Artificial Sequence
  Description of Artificial Sequence: Synthetic oligonucleotide
catgttggccaggctagttt

SEQ ID NO: 4996 - DNA, 20 bp, Artificial Sequence
  Description of Artificial Sequence: Synthetic oligonucleotide
atgttggccaggctagtttt

SEQ ID NO: 4997 - DNA, 20 bp, Artificial Sequence
  Description of Artificial Sequence: Synthetic oligonucleotide
tgttggccaggctagttttg

SEQ ID NO: 4998 - DNA, 20 bp, Artificial Sequence
  Description of Artificial Sequence: Synthetic oligonucleotide
gttggccaggctagttttga

SEQ ID NO: 4999 - DNA, 20 bp, Artificial Sequence
  Description of Artificial Sequence: Synthetic oligonucleotide
ttggccaggctagttttgaa

SEQ ID NO: 5000 - DNA, 20 bp, Artificial Sequence
  Description of Artificial Sequence: Synthetic oligonucleotide
tggccaggctagttttgaac

SEQ ID NO: 5001 - DNA, 20 bp, Artificial Sequence
  Description of Artificial Sequence: Synthetic oligonucleotide
ggccaggctagttttgaact

SEQ ID NO: 5002 - DNA, 20 bp, Artificial Sequence
  Description of Artificial Sequence: Synthetic oligonucleotide
gccaggctagttttgaactc

SEQ ID NO: 5003 - DNA, 20 bp, Artificial Sequence
  Description of Artificial Sequence: Synthetic oligonucleotide
ccaggctagttttgaactcc

SEQ ID NO: 5004 - DNA, 20 bp, Artificial Sequence
  Description of Artificial Sequence: Synthetic oligonucleotide
caggctagttttgaactcct

SEQ ID NO: 5005 - DNA, 20 bp, Artificial Sequence
  Description of Artificial Sequence: Synthetic oligonucleotide
aggctagttttgaactcctg

SEQ ID NO: 5006 - DNA, 20 bp, Artificial Sequence
  Description of Artificial Sequence: Synthetic oligonucleotide
ggctagttttgaactcctga

SEQ ID NO: 5007 - DNA, 20 bp, Artificial Sequence
  Description of Artificial Sequence: Synthetic oligonucleotide
gctagttttgaactcctgac

SEQ ID NO: 5008 - DNA, 20 bp, Artificial Sequence
  Description of Artificial Sequence: Synthetic oligonucleotide
ctagttttgaactcctgacc

SEQ ID NO: 5009 - DNA, 20 bp, Artificial Sequence
  Description of Artificial Sequence: Synthetic oligonucleotide
tagttttgaactcctgacct

SEQ ID NO: 5010 - DNA, 20 bp, Artificial Sequence
  Description of Artificial Sequence: Synthetic oligonucleotide
agttttgaactcctgacctc

SEQ ID NO: 5011 - DNA, 20 bp, Artificial Sequence
  Description of Artificial Sequence: Synthetic oligonucleotide
gttttgaactcctgacctca

SEQ ID NO: 5012 - DNA, 20 bp, Artificial Sequence
  Description of Artificial Sequence: Synthetic oligonucleotide
ttttgaactcctgacctcag

SEQ ID NO: 5013 - DNA, 20 bp, Artificial Sequence
  Description of Artificial Sequence: Synthetic oligonucleotide
tttgaactcctgacctcagg

SEQ ID NO: 5014 - DNA, 20 bp, Artificial Sequence
  Description of Artificial Sequence: Synthetic oligonucleotide
ttgaactcctgacctcaggt

SEQ ID NO: 5015 - DNA, 20 bp, Artificial Sequence
  Description of Artificial Sequence: Synthetic oligonucleotide
tgaactcctgacctcaggtg

SEQ ID NO: 5016 - DNA, 20 bp, Artificial Sequence
  Description of Artificial Sequence: Synthetic oligonucleotide
gaactcctgacctcaggtga

SEQ ID NO: 5017 - DNA, 20 bp, Artificial Sequence
  Description of Artificial Sequence: Synthetic oligonucleotide
aactcctgacctcaggtgat

SEQ ID NO: 5018 - DNA, 20 bp, Artificial Sequence
  Description of Artificial Sequence: Synthetic oligonucleotide
actcctgacctcaggtgatc

SEQ ID NO: 5019 - DNA, 20 bp, Artificial Sequence
  Description of Artificial Sequence: Synthetic oligonucleotide
ctcctgacctcaggtgatcc

SEQ ID NO: 5020 - DNA, 20 bp, Artificial Sequence
  Description of Artificial Sequence: Synthetic oligonucleotide
tcctgacctcaggtgatcca

SEQ ID NO: 5021 - DNA, 20 bp, Artificial Sequence
  Description of Artificial Sequence: Synthetic oligonucleotide
cctgacctcaggtgatccac

SEQ ID NO: 5022 - DNA, 20 bp, Artificial Sequence
  Description of Artificial Sequence: Synthetic oligonucleotide
ctgacctcaggtgatccacc

SEQ ID NO: 5023 - DNA, 20 bp, Artificial Sequence
  Description of Artificial Sequence: Synthetic oligonucleotide
tgacctcaggtgatccaccc

SEQ ID NO: 5024 - DNA, 20 bp, Artificial Sequence
  Description of Artificial Sequence: Synthetic oligonucleotide
gacctcaggtgatccaccca

SEQ ID NO: 5025 - DNA, 20 bp, Artificial Sequence
  Description of Artificial Sequence: Synthetic oligonucleotide
acctcaggtgatccacccac

SEQ ID NO: 5026 - DNA, 20 bp, Artificial Sequence
  Description of Artificial Sequence: Synthetic oligonucleotide
cctcaggtgatccacccacc

SEQ ID NO: 5027 - DNA, 20 bp, Artificial Sequence
  Description of Artificial Sequence: Synthetic oligonucleotide
ctcaggtgatccacccacct

SEQ ID NO: 5028 - DNA, 20 bp, Artificial Sequence
  Description of Artificial Sequence: Synthetic oligonucleotide
tcaggtgatccacccacctc

SEQ ID NO: 5029 - DNA, 20 bp, Artificial Sequence
  Description of Artificial Sequence: Synthetic oligonucleotide
caggtgatccacccacctcg

SEQ ID NO: 5030 - DNA, 20 bp, Artificial Sequence
  Description of Artificial Sequence: Synthetic oligonucleotide
aggtgatccacccacctcgg

SEQ ID NO: 5031 - DNA, 20 bp, Artificial Sequence
  Description of Artificial Sequence: Synthetic oligonucleotide
ggtgatccacccacctcggc

SEQ ID NO: 5032 - DNA, 20 bp, Artificial Sequence
  Description of Artificial Sequence: Synthetic oligonucleotide
gtgatccacccacctcggcc

SEQ ID NO: 5033 - DNA, 20 bp, Artificial Sequence
  Description of Artificial Sequence: Synthetic oligonucleotide
tgatccacccacctcggcct

SEQ ID NO: 5034 - DNA, 20 bp, Artificial Sequence
  Description of Artificial Sequence: Synthetic oligonucleotide
gatccacccacctcggcctc

SEQ ID NO: 5035 - DNA, 20 bp, Artificial Sequence
  Description of Artificial Sequence: Synthetic oligonucleotide
atccacccacctcggcctcc

SEQ ID NO: 5036 - DNA, 20 bp, Artificial Sequence
  Description of Artificial Sequence: Synthetic oligonucleotide
tccacccacctcggcctccc

SEQ ID NO: 5037 - DNA, 20 bp, Artificial Sequence
  Description of Artificial Sequence: Synthetic oligonucleotide
ccacccacctcggcctccca

SEQ ID NO: 5038 - DNA, 20 bp, Artificial Sequence
  Description of Artificial Sequence: Synthetic oligonucleotide
cacccacctcggcctcccaa

SEQ ID NO: 5039 - DNA, 20 bp, Artificial Sequence
  Description of Artificial Sequence: Synthetic oligonucleotide
acccacctcggcctcccaaa

SEQ ID NO: 5040 - DNA, 20 bp, Artificial Sequence
  Description of Artificial Sequence: Synthetic oligonucleotide
cccacctcggcctcccaaag

SEQ ID NO: 5041 - DNA, 20 bp, Artificial Sequence
  Description of Artificial Sequence: Synthetic oligonucleotide
ccacctcggcctcccaaagt

SEQ ID NO: 5042 - DNA, 20 bp, Artificial Sequence
  Description of Artificial Sequence: Synthetic oligonucleotide
cacctcggcctcccaaagtg

SEQ ID NO: 5043 - DNA, 20 bp, Artificial Sequence
  Description of Artificial Sequence: Synthetic oligonucleotide
acctcggcctcccaaagtgc

SEQ ID NO: 5044 - DNA, 20 bp, Artificial Sequence
  Description of Artificial Sequence: Synthetic oligonucleotide
cctcggcctcccaaagtgct

SEQ ID NO: 5045 - DNA, 20 bp, Artificial Sequence
  Description of Artificial Sequence: Synthetic oligonucleotide
ctcggcctcccaaagtgctg

SEQ ID NO: 5046 - DNA, 20 bp, Artificial Sequence
  Description of Artificial Sequence: Synthetic oligonucleotide
tcggcctcccaaagtgctgg

SEQ ID NO: 5047 - DNA, 20 bp, Artificial Sequence
  Description of Artificial Sequence: Synthetic oligonucleotide
cggcctcccaaagtgctggg

SEQ ID NO: 5048 - DNA, 20 bp, Artificial Sequence
  Description of Artificial Sequence: Synthetic oligonucleotide
ggcctcccaaagtgctggga

SEQ ID NO: 5049 - DNA, 20 bp, Artificial Sequence
  Description of Artificial Sequence: Synthetic oligonucleotide
gcctcccaaagtgctgggat

SEQ ID NO: 5050 - DNA, 20 bp, Artificial Sequence
  Description of Artificial Sequence: Synthetic oligonucleotide
cctcccaaagtgctgggatt

SEQ ID NO: 5051 - DNA, 20 bp, Artificial Sequence
  Description of Artificial Sequence: Synthetic oligonucleotide
ctcccaaagtgctgggatta

SEQ ID NO: 5052 - DNA, 20 bp, Artificial Sequence
  Description of Artificial Sequence: Synthetic oligonucleotide
tcccaaagtgctgggattac

SEQ ID NO: 5053 - DNA, 20 bp, Artificial Sequence
  Description of Artificial Sequence: Synthetic oligonucleotide
cccaaagtgctgggattaca

SEQ ID NO: 5054 - DNA, 20 bp, Artificial Sequence
  Description of Artificial Sequence: Synthetic oligonucleotide
ccaaagtgctgggattacag

SEQ ID NO: 5055 - DNA, 20 bp, Artificial Sequence
  Description of Artificial Sequence: Synthetic oligonucleotide
caaagtgctgggattacagg

SEQ ID NO: 5056 - DNA, 20 bp, Artificial Sequence
  Description of Artificial Sequence: Synthetic oligonucleotide
aaagtgctgggattacaggt

SEQ ID NO: 5057 - DNA, 20 bp, Artificial Sequence
  Description of Artificial Sequence: Synthetic oligonucleotide
aagtgctgggattacaggtg

SEQ ID NO: 5058 - DNA, 20 bp, Artificial Sequence
  Description of Artificial Sequence: Synthetic oligonucleotide
agtgctgggattacaggtgt

SEQ ID NO: 5059 - DNA, 20 bp, Artificial Sequence
  Description of Artificial Sequence: Synthetic oligonucleotide
gtgctgggattacaggtgtg

SEQ ID NO: 5060 - DNA, 20 bp, Artificial Sequence
  Description of Artificial Sequence: Synthetic oligonucleotide
tgctgggattacaggtgtga

SEQ ID NO: 5061 - DNA, 20 bp, Artificial Sequence
  Description of Artificial Sequence: Synthetic oligonucleotide
gctgggattacaggtgtgag

SEQ ID NO: 5062 - DNA, 20 bp, Artificial Sequence
  Description of Artificial Sequence: Synthetic oligonucleotide
ctgggattacaggtgtgagc

SEQ ID NO: 5063 - DNA, 20 bp, Artificial Sequence
  Description of Artificial Sequence: Synthetic oligonucleotide
tgggattacaggtgtgagcc

SEQ ID NO: 5064 - DNA, 20 bp, Artificial Sequence
  Description of Artificial Sequence: Synthetic oligonucleotide
gggattacaggtgtgagccc

SEQ ID NO: 5065 - DNA, 20 bp, Artificial Sequence
  Description of Artificial Sequence: Synthetic oligonucleotide
ggattacaggtgtgagcccc

SEQ ID NO: 5066 - DNA, 20 bp, Artificial Sequence
  Description of Artificial Sequence: Synthetic oligonucleotide
gattacaggtgtgagccccc

SEQ ID NO: 5067 - DNA, 20 bp, Artificial Sequence
  Description of Artificial Sequence: Synthetic oligonucleotide
attacaggtgtgagccccca

SEQ ID NO: 5068 - DNA, 20 bp, Artificial Sequence
  Description of Artificial Sequence: Synthetic oligonucleotide
ttacaggtgtgagcccccac

SEQ ID NO: 5069 - DNA, 20 bp, Artificial Sequence
  Description of Artificial Sequence: Synthetic oligonucleotide
tacaggtgtgagcccccaca

SEQ ID NO: 5070 - DNA, 20 bp, Artificial Sequence
  Description of Artificial Sequence: Synthetic oligonucleotide
acaggtgtgagcccccacac

SEQ ID NO: 5071 - DNA, 20 bp, Artificial Sequence
  Description of Artificial Sequence: Synthetic oligonucleotide
caggtgtgagcccccacacc

SEQ ID NO: 5072 - DNA, 20 bp, Artificial Sequence
  Description of Artificial Sequence: Synthetic oligonucleotide
aggtgtgagcccccacaccc

SEQ ID NO: 5073 - DNA, 20 bp, Artificial Sequence
  Description of Artificial Sequence: Synthetic oligonucleotide
ggtgtgagcccccacacccg

SEQ ID NO: 5074 - DNA, 20 bp, Artificial Sequence
  Description of Artificial Sequence: Synthetic oligonucleotide
gtgtgagcccccacacccgg

SEQ ID NO: 5075 - DNA, 20 bp, Artificial Sequence
  Description of Artificial Sequence: Synthetic oligonucleotide
tgtgagcccccacacccggc

SEQ ID NO: 5076 - DNA, 20 bp, Artificial Sequence
  Description of Artificial Sequence: Synthetic oligonucleotide
gtgagcccccacacccggcc

SEQ ID NO: 5077 - DNA, 20 bp, Artificial Sequence
  Description of Artificial Sequence: Synthetic oligonucleotide
tgagcccccacacccggcct

SEQ ID NO: 5078 - DNA, 20 bp, Artificial Sequence
  Description of Artificial Sequence: Synthetic oligonucleotide
gagcccccacacccggcctt

SEQ ID NO: 5079 - DNA, 20 bp, Artificial Sequence
  Description of Artificial Sequence: Synthetic oligonucleotide
agcccccacacccggcctta

SEQ ID NO: 5080 - DNA, 20 bp, Artificial Sequence
  Description of Artificial Sequence: Synthetic oligonucleotide
gcccccacacccggccttat

SEQ ID NO: 5081 - DNA, 20 bp, Artificial Sequence
  Description of Artificial Sequence: Synthetic oligonucleotide
cccccacacccggccttatt

SEQ ID NO: 5082 - DNA, 20 bp, Artificial Sequence
  Description of Artificial Sequence: Synthetic oligonucleotide
ccccacacccggccttattt

SEQ ID NO: 5083 - DNA, 20 bp, Artificial Sequence
  Description of Artificial Sequence: Synthetic oligonucleotide
cccacacccggccttatttt

SEQ ID NO: 5084 - DNA, 20 bp, Artificial Sequence
  Description of Artificial Sequence: Synthetic oligonucleotide
ccacacccggccttattttt

SEQ ID NO: 5085 - DNA, 20 bp, Artificial Sequence
  Description of Artificial Sequence: Synthetic oligonucleotide
cacacccggccttattttta

SEQ ID NO: 5086 - DNA, 20 bp, Artificial Sequence
  Description of Artificial Sequence: Synthetic oligonucleotide
acacccggccttatttttaa

SEQ ID NO: 5087 - DNA, 20 bp, Artificial Sequence
  Description of Artificial Sequence: Synthetic oligonucleotide
cacccggccttatttttaag

SEQ ID NO: 5088 - DNA, 20 bp, Artificial Sequence
  Description of Artificial Sequence: Synthetic oligonucleotide
acccggccttatttttaagt

SEQ ID NO: 5089 - DNA, 20 bp, Artificial Sequence
  Description of Artificial Sequence: Synthetic oligonucleotide
cccggccttatttttaagtt

SEQ ID NO: 5090 - DNA, 20 bp, Artificial Sequence
  Description of Artificial Sequence: Synthetic oligonucleotide
ccggccttatttttaagttt

SEQ ID NO: 5091 - DNA, 20 bp, Artificial Sequence
  Description of Artificial Sequence: Synthetic oligonucleotide
cggccttatttttaagttta

SEQ ID NO: 5092 - DNA, 20 bp, Artificial Sequence
  Description of Artificial Sequence: Synthetic oligonucleotide
ggccttatttttaagtttaa

SEQ ID NO: 5093 - DNA, 20 bp, Artificial Sequence
  Description of Artificial Sequence: Synthetic oligonucleotide
gccttatttttaagtttaaa

SEQ ID NO: 5094 - DNA, 20 bp, Artificial Sequence
  Description of Artificial Sequence: Synthetic oligonucleotide
ccttatttttaagtttaaaa

SEQ ID NO: 5095 - DNA, 20 bp, Artificial Sequence
  Description of Artificial Sequence: Synthetic oligonucleotide
cttatttttaagtttaaaaa

SEQ ID NO: 5096 - DNA, 20 bp, Artificial Sequence
  Description of Artificial Sequence: Synthetic oligonucleotide
ttatttttaagtttaaaaac

SEQ ID NO: 5097 - DNA, 20 bp, Artificial Sequence
  Description of Artificial Sequence: Synthetic oligonucleotide
tatttttaagtttaaaaaca

SEQ ID NO: 5098 - DNA, 20 bp, Artificial Sequence
  Description of Artificial Sequence: Synthetic oligonucleotide
atttttaagtttaaaaacaa

SEQ ID NO: 5099 - DNA, 20 bp, Artificial Sequence
  Description of Artificial Sequence: Synthetic oligonucleotide
tttttaagtttaaaaacaat

SEQ ID NO: 5100 - DNA, 20 bp, Artificial Sequence
  Description of Artificial Sequence: Synthetic oligonucleotide
ttttaagtttaaaaacaatt

SEQ ID NO: 5101 - DNA, 20 bp, Artificial Sequence
  Description of Artificial Sequence: Synthetic oligonucleotide
tttaagtttaaaaacaattt

SEQ ID NO: 5102 - DNA, 20 bp, Artificial Sequence
  Description of Artificial Sequence: Synthetic oligonucleotide
ttaagtttaaaaacaatttt

SEQ ID NO: 5103 - DNA, 20 bp, Artificial Sequence
  Description of Artificial Sequence: Synthetic oligonucleotide
taagtttaaaaacaattttt

SEQ ID NO: 5104 - DNA, 20 bp, Artificial Sequence
  Description of Artificial Sequence: Synthetic oligonucleotide
aagtttaaaaacaatttttt

SEQ ID NO: 5105 - DNA, 20 bp, Artificial Sequence
  Description of Artificial Sequence: Synthetic oligonucleotide
agtttaaaaacaattttttt

SEQ ID NO: 5106 - DNA, 20 bp, Artificial Sequence
  Description of Artificial Sequence: Synthetic oligonucleotide
gtttaaaaacaatttttttt

SEQ ID NO: 5107 - DNA, 20 bp, Artificial Sequence
  Description of Artificial Sequence: Synthetic oligonucleotide
tttaaaaacaattttttttg

SEQ ID NO: 5108 - DNA, 20 bp, Artificial Sequence
  Description of Artificial Sequence: Synthetic oligonucleotide
ttaaaaacaattttttttga

SEQ ID NO: 5109 - DNA, 20 bp, Artificial Sequence
  Description of Artificial Sequence: Synthetic oligonucleotide
taaaaacaattttttttgag

SEQ ID NO: 5110 - DNA, 20 bp, Artificial Sequence
  Description of Artificial Sequence: Synthetic oligonucleotide
aaaaacaattttttttgaga

SEQ ID NO: 5111 - DNA, 20 bp, Artificial Sequence
  Description of Artificial Sequence: Synthetic oligonucleotide
aaaacaattttttttgagac

SEQ ID NO: 5112 - DNA, 20 bp, Artificial Sequence
  Description of Artificial Sequence: Synthetic oligonucleotide
aaacaattttttttgagaca

SEQ ID NO: 5113 - DNA, 20 bp, Artificial Sequence
  Description of Artificial Sequence: Synthetic oligonucleotide
aacaattttttttgagacag

SEQ ID NO: 5114 - DNA, 20 bp, Artificial Sequence
  Description of Artificial Sequence: Synthetic oligonucleotide
acaattttttttgagacagg

SEQ ID NO: 5115 - DNA, 20 bp, Artificial Sequence
  Description of Artificial Sequence: Synthetic oligonucleotide
caattttttttgagacaggg

SEQ ID NO: 5116 - DNA, 20 bp, Artificial Sequence
  Description of Artificial Sequence: Synthetic oligonucleotide
aattttttttgagacagggc

SEQ ID NO: 5117 - DNA, 20 bp, Artificial Sequence
  Description of Artificial Sequence: Synthetic oligonucleotide
attttttttgagacagggcc

SEQ ID NO: 5118 - DNA, 20 bp, Artificial Sequence
  Description of Artificial Sequence: Synthetic oligonucleotide
ttttttttgagacagggcct

SEQ ID NO: 5119 - DNA, 20 bp, Artificial Sequence
  Description of Artificial Sequence: Synthetic oligonucleotide
tttttttgagacagggcctg

SEQ ID NO: 5120 - DNA, 20 bp, Artificial Sequence
  Description of Artificial Sequence: Synthetic oligonucleotide
ttttttgagacagggcctgg

SEQ ID NO: 5121 - DNA, 20 bp, Artificial Sequence
  Description of Artificial Sequence: Synthetic oligonucleotide
tttttgagacagggcctggc

SEQ ID NO: 5122 - DNA, 20 bp, Artificial Sequence
  Description of Artificial Sequence: Synthetic oligonucleotide
ttttgagacagggcctggct

SEQ ID NO: 5123 - DNA, 20 bp, Artificial Sequence
  Description of Artificial Sequence: Synthetic oligonucleotide
tttgagacagggcctggctc

SEQ ID NO: 5124 - DNA, 20 bp, Artificial Sequence
  Description of Artificial Sequence: Synthetic oligonucleotide
ttgagacagggcctggctcc

SEQ ID NO: 5125 - DNA, 20 bp, Artificial Sequence
  Description of Artificial Sequence: Synthetic oligonucleotide
tgagacagggcctggctcca

SEQ ID NO: 5126 - DNA, 20 bp, Artificial Sequence
  Description of Artificial Sequence: Synthetic oligonucleotide
gagacagggcctggctccat

SEQ ID NO: 5127 - DNA, 20 bp, Artificial Sequence
  Description of Artificial Sequence: Synthetic oligonucleotide
agacagggcctggctccatt

SEQ ID NO: 5128 - DNA, 20 bp, Artificial Sequence
  Description of Artificial Sequence: Synthetic oligonucleotide
gacagggcctggctccattg

SEQ ID NO: 5129 - DNA, 20 bp, Artificial Sequence
  Description of Artificial Sequence: Synthetic oligonucleotide
acagggcctggctccattgc

SEQ ID NO: 5130 - DNA, 20 bp, Artificial Sequence
  Description of Artificial Sequence: Synthetic oligonucleotide
cagggcctggctccattgcc

SEQ ID NO: 5131 - DNA, 20 bp, Artificial Sequence
  Description of Artificial Sequence: Synthetic oligonucleotide
agggcctggctccattgccc

SEQ ID NO: 5132 - DNA, 20 bp, Artificial Sequence
  Description of Artificial Sequence: Synthetic oligonucleotide
gggcctggctccattgccca

SEQ ID NO: 5133 - DNA, 20 bp, Artificial Sequence
  Description of Artificial Sequence: Synthetic oligonucleotide
ggcctggctccattgcccag

SEQ ID NO: 5134 - DNA, 20 bp, Artificial Sequence
  Description of Artificial Sequence: Synthetic oligonucleotide
gcctggctccattgcccagg

SEQ ID NO: 5135 - DNA, 20 bp, Artificial Sequence
  Description of Artificial Sequence: Synthetic oligonucleotide
cctggctccattgcccaggc

SEQ ID NO: 5136 - DNA, 20 bp, Artificial Sequence
  Description of Artificial Sequence: Synthetic oligonucleotide
ctggctccattgcccaggct

SEQ ID NO: 5137 - DNA, 20 bp, Artificial Sequence
  Description of Artificial Sequence: Synthetic oligonucleotide
tggctccattgcccaggctg

SEQ ID NO: 5138 - DNA, 20 bp, Artificial Sequence
  Description of Artificial Sequence: Synthetic oligonucleotide
ggctccattgcccaggctgg

SEQ ID NO: 5139 - DNA, 20 bp, Artificial Sequence
  Description of Artificial Sequence: Synthetic oligonucleotide
gctccattgcccaggctgga

SEQ ID NO: 5140 - DNA, 20 bp, Artificial Sequence
  Description of Artificial Sequence: Synthetic oligonucleotide
ctccattgcccaggctggag

SEQ ID NO: 5141 - DNA, 20 bp, Artificial Sequence
  Description of Artificial Sequence: Synthetic oligonucleotide
tccattgcccaggctggagt

SEQ ID NO: 5142 - DNA, 20 bp, Artificial Sequence
  Description of Artificial Sequence: Synthetic oligonucleotide
ccattgcccaggctggagtg

SEQ ID NO: 5143 - DNA, 20 bp, Artificial Sequence
  Description of Artificial Sequence: Synthetic oligonucleotide
cattgcccaggctggagtgc

SEQ ID NO: 5144 - DNA, 20 bp, Artificial Sequence
  Description of Artificial Sequence: Synthetic oligonucleotide
attgcccaggctggagtgca

SEQ ID NO: 5145 - DNA, 20 bp, Artificial Sequence
  Description of Artificial Sequence: Synthetic oligonucleotide
ttgcccaggctggagtgcag

SEQ ID NO: 5146 - DNA, 20 bp, Artificial Sequence
  Description of Artificial Sequence: Synthetic oligonucleotide
tgcccaggctggagtgcagt

SEQ ID NO: 5147 - DNA, 20 bp, Artificial Sequence
  Description of Artificial Sequence: Synthetic oligonucleotide
gcccaggctggagtgcagtg

SEQ ID NO: 5148 - DNA, 20 bp, Artificial Sequence
  Description of Artificial Sequence: Synthetic oligonucleotide
cccaggctggagtgcagtgg

SEQ ID NO: 5149 - DNA, 20 bp, Artificial Sequence
  Description of Artificial Sequence: Synthetic oligonucleotide
ccaggctggagtgcagtggt

SEQ ID NO: 5150 - DNA, 20 bp, Artificial Sequence
  Description of Artificial Sequence: Synthetic oligonucleotide
caggctggagtgcagtggtg

SEQ ID NO: 5151 - DNA, 20 bp, Artificial Sequence
  Description of Artificial Sequence: Synthetic oligonucleotide
aggctggagtgcagtggtgt

SEQ ID NO: 5152 - DNA, 20 bp, Artificial Sequence
  Description of Artificial Sequence: Synthetic oligonucleotide
ggctggagtgcagtggtgtg

SEQ ID NO: 5153 - DNA, 20 bp, Artificial Sequence
  Description of Artificial Sequence: Synthetic oligonucleotide
gctggagtgcagtggtgtgg

SEQ ID NO: 5154 - DNA, 20 bp, Artificial Sequence
  Description of Artificial Sequence: Synthetic oligonucleotide
ctggagtgcagtggtgtggt

SEQ ID NO: 5155 - DNA, 20 bp, Artificial Sequence
  Description of Artificial Sequence: Synthetic oligonucleotide
tggagtgcagtggtgtggtg

SEQ ID NO: 5156 - DNA, 20 bp, Artificial Sequence
  Description of Artificial Sequence: Synthetic oligonucleotide
ggagtgcagtggtgtggtga

SEQ ID NO: 5157 - DNA, 20 bp, Artificial Sequence
  Description of Artificial Sequence: Synthetic oligonucleotide
gagtgcagtggtgtggtgat

SEQ ID NO: 5158 - DNA, 20 bp, Artificial Sequence
  Description of Artificial Sequence: Synthetic oligonucleotide
agtgcagtggtgtggtgatg

SEQ ID NO: 5159 - DNA, 20 bp, Artificial Sequence
  Description of Artificial Sequence: Synthetic oligonucleotide
gtgcagtggtgtggtgatgg

SEQ ID NO: 5160 - DNA, 20 bp, Artificial Sequence
  Description of Artificial Sequence: Synthetic oligonucleotide
tgcagtggtgtggtgatggc

SEQ ID NO: 5161 - DNA, 20 bp, Artificial Sequence
  Description of Artificial Sequence: Synthetic oligonucleotide
gcagtggtgtggtgatggct

SEQ ID NO: 5162 - DNA, 20 bp, Artificial Sequence
  Description of Artificial Sequence: Synthetic oligonucleotide
cagtggtgtggtgatggctc

SEQ ID NO: 5163 - DNA, 20 bp, Artificial Sequence
  Description of Artificial Sequence: Synthetic oligonucleotide
agtggtgtggtgatggctca

SEQ ID NO: 5164 - DNA, 20 bp, Artificial Sequence
  Description of Artificial Sequence: Synthetic oligonucleotide
gtggtgtggtgatggctcaa

SEQ ID NO: 5165 - DNA, 20 bp, Artificial Sequence
  Description of Artificial Sequence: Synthetic oligonucleotide
tggtgtggtgatggctcaat

SEQ ID NO: 5166 - DNA, 20 bp, Artificial Sequence
  Description of Artificial Sequence: Synthetic oligonucleotide
ggtgtggtgatggctcaatg

SEQ ID NO: 5167 - DNA, 20 bp, Artificial Sequence
  Description of Artificial Sequence: Synthetic oligonucleotide
gtgtggtgatggctcaatgc

SEQ ID NO: 5168 - DNA, 20 bp, Artificial Sequence
  Description of Artificial Sequence: Synthetic oligonucleotide
tgtggtgatggctcaatgca

SEQ ID NO: 5169 - DNA, 20 bp, Artificial Sequence
  Description of Artificial Sequence: Synthetic oligonucleotide
gtggtgatggctcaatgcag

SEQ ID NO: 5170 - DNA, 20 bp, Artificial Sequence
  Description of Artificial Sequence: Synthetic oligonucleotide
tggtgatggctcaatgcagc

SEQ ID NO: 5171 - DNA, 20 bp, Artificial Sequence
  Description of Artificial Sequence: Synthetic oligonucleotide
ggtgatggctcaatgcagcg

SEQ ID NO: 5172 - DNA, 20 bp, Artificial Sequence
  Description of Artificial Sequence: Synthetic oligonucleotide
gtgatggctcaatgcagcgt

SEQ ID NO: 5173 - DNA, 20 bp, Artificial Sequence
  Description of Artificial Sequence: Synthetic oligonucleotide
tgatggctcaatgcagcgtc

SEQ ID NO: 5174 - DNA, 20 bp, Artificial Sequence
  Description of Artificial Sequence: Synthetic oligonucleotide
gatggctcaatgcagcgtca

SEQ ID NO: 5175 - DNA, 20 bp, Artificial Sequence
  Description of Artificial Sequence: Synthetic oligonucleotide
atggctcaatgcagcgtcaa

SEQ ID NO: 5176 - DNA, 20 bp, Artificial Sequence
  Description of Artificial Sequence: Synthetic oligonucleotide
tggctcaatgcagcgtcaac

SEQ ID NO: 5177 - DNA, 20 bp, Artificial Sequence
  Description of Artificial Sequence: Synthetic oligonucleotide
ggctcaatgcagcgtcaacc

SEQ ID NO: 5178 - DNA, 20 bp, Artificial Sequence
  Description of Artificial Sequence: Synthetic oligonucleotide
gctcaatgcagcgtcaacct

SEQ ID NO: 5179 - DNA, 20 bp, Artificial Sequence
  Description of Artificial Sequence: Synthetic oligonucleotide
ctcaatgcagcgtcaacctt

SEQ ID NO: 5180 - DNA, 20 bp, Artificial Sequence
  Description of Artificial Sequence: Synthetic oligonucleotide
tcaatgcagcgtcaacctta

SEQ ID NO: 5181 - DNA, 20 bp, Artificial Sequence
  Description of Artificial Sequence: Synthetic oligonucleotide
caatgcagcgtcaaccttac

SEQ ID NO: 5182 - DNA, 20 bp, Artificial Sequence
  Description of Artificial Sequence: Synthetic oligonucleotide
aatgcagcgtcaaccttacg

SEQ ID NO: 5183 - DNA, 20 bp, Artificial Sequence
  Description of Artificial Sequence: Synthetic oligonucleotide
atgcagcgtcaaccttacgg

SEQ ID NO: 5184 - DNA, 20 bp, Artificial Sequence
  Description of Artificial Sequence: Synthetic oligonucleotide
tgcagcgtcaaccttacggg

SEQ ID NO: 5185 - DNA, 20 bp, Artificial Sequence
  Description of Artificial Sequence: Synthetic oligonucleotide
gcagcgtcaaccttacgggc

SEQ ID NO: 5186 - DNA, 20 bp, Artificial Sequence
  Description of Artificial Sequence: Synthetic oligonucleotide
cagcgtcaaccttacgggct

SEQ ID NO: 5187 - DNA, 20 bp, Artificial Sequence
  Description of Artificial Sequence: Synthetic oligonucleotide
agcgtcaaccttacgggctc

SEQ ID NO: 5188 - DNA, 20 bp, Artificial Sequence
  Description of Artificial Sequence: Synthetic oligonucleotide
gcgtcaaccttacgggctca

SEQ ID NO: 5189 - DNA, 20 bp, Artificial Sequence
  Description of Artificial Sequence: Synthetic oligonucleotide
cgtcaaccttacgggctcaa

SEQ ID NO: 5190 - DNA, 20 bp, Artificial Sequence
  Description of Artificial Sequence: Synthetic oligonucleotide
gtcaaccttacgggctcaag

SEQ ID NO: 5191 - DNA, 20 bp, Artificial Sequence
  Description of Artificial Sequence: Synthetic oligonucleotide
tcaaccttacgggctcaagt

SEQ ID NO: 5192 - DNA, 20 bp, Artificial Sequence
  Description of Artificial Sequence: Synthetic oligonucleotide
caaccttacgggctcaagtg

SEQ ID NO: 5193 - DNA, 20 bp, Artificial Sequence
  Description of Artificial Sequence: Synthetic oligonucleotide
aaccttacgggctcaagtga

SEQ ID NO: 5194 - DNA, 20 bp, Artificial Sequence
  Description of Artificial Sequence: Synthetic oligonucleotide
accttacgggctcaagtgat

SEQ ID NO: 5195 - DNA, 20 bp, Artificial Sequence
  Description of Artificial Sequence: Synthetic oligonucleotide
ccttacgggctcaagtgatt

SEQ ID NO: 5196 - DNA, 20 bp, Artificial Sequence
  Description of Artificial Sequence: Synthetic oligonucleotide
cttacgggctcaagtgattc

SEQ ID NO: 5197 - DNA, 20 bp, Artificial Sequence
  Description of Artificial Sequence: Synthetic oligonucleotide
ttacgggctcaagtgattct

SEQ ID NO: 5198 - DNA, 20 bp, Artificial Sequence
  Description of Artificial Sequence: Synthetic oligonucleotide
tacgggctcaagtgattctt

SEQ ID NO: 5199 - DNA, 20 bp, Artificial Sequence
  Description of Artificial Sequence: Synthetic oligonucleotide
acgggctcaagtgattcttg

SEQ ID NO: 5200 - DNA, 20 bp, Artificial Sequence
  Description of Artificial Sequence: Synthetic oligonucleotide
cgggctcaagtgattcttgt

SEQ ID NO: 5201 - DNA, 20 bp, Artificial Sequence
  Description of Artificial Sequence: Synthetic oligonucleotide
gggctcaagtgattcttgta

SEQ ID NO: 5202 - DNA, 20 bp, Artificial Sequence
  Description of Artificial Sequence: Synthetic oligonucleotide
ggctcaagtgattcttgtac

SEQ ID NO: 5203 - DNA, 20 bp, Artificial Sequence
  Description of Artificial Sequence: Synthetic oligonucleotide
gctcaagtgattcttgtacc

SEQ ID NO: 5204 - DNA, 20 bp, Artificial Sequence
  Description of Artificial Sequence: Synthetic oligonucleotide
ctcaagtgattcttgtacct

SEQ ID NO: 5205 - DNA, 20 bp, Artificial Sequence
  Description of Artificial Sequence: Synthetic oligonucleotide
tcaagtgattcttgtacctg

SEQ ID NO: 5206 - DNA, 20 bp, Artificial Sequence
  Description of Artificial Sequence: Synthetic oligonucleotide
caagtgattcttgtacctgg

SEQ ID NO: 5207 - DNA, 20 bp, Artificial Sequence
  Description of Artificial Sequence: Synthetic oligonucleotide
aagtgattcttgtacctggg

SEQ ID NO: 5208 - DNA, 20 bp, Artificial Sequence
  Description of Artificial Sequence: Synthetic oligonucleotide
agtgattcttgtacctgggc

SEQ ID NO: 5209 - DNA, 20 bp, Artificial Sequence
  Description of Artificial Sequence: Synthetic oligonucleotide
gtgattcttgtacctgggcc

SEQ ID NO: 5210 - DNA, 20 bp, Artificial Sequence
  Description of Artificial Sequence: Synthetic oligonucleotide
tgattcttgtacctgggcct

SEQ ID NO: 5211 - DNA, 20 bp, Artificial Sequence
  Description of Artificial Sequence: Synthetic oligonucleotide
gattcttgtacctgggcctc

SEQ ID NO: 5212 - DNA, 20 bp, Artificial Sequence
  Description of Artificial Sequence: Synthetic oligonucleotide
attcttgtacctgggcctcc

SEQ ID NO: 5213 - DNA, 20 bp, Artificial Sequence
  Description of Artificial Sequence: Synthetic oligonucleotide
ttcttgtacctgggcctccc

SEQ ID NO: 5214 - DNA, 20 bp, Artificial Sequence
  Description of Artificial Sequence: Synthetic oligonucleotide
tcttgtacctgggcctccca

SEQ ID NO: 5215 - DNA, 20 bp, Artificial Sequence
  Description of Artificial Sequence: Synthetic oligonucleotide
cttgtacctgggcctcccaa

SEQ ID NO: 5216 - DNA, 20 bp, Artificial Sequence
  Description of Artificial Sequence: Synthetic oligonucleotide
ttgtacctgggcctcccaag

SEQ ID NO: 5217 - DNA, 20 bp, Artificial Sequence
  Description of Artificial Sequence: Synthetic oligonucleotide
tgtacctgggcctcccaagt

SEQ ID NO: 5218 - DNA, 20 bp, Artificial Sequence
  Description of Artificial Sequence: Synthetic oligonucleotide
gtacctgggcctcccaagta

SEQ ID NO: 5219 - DNA, 20 bp, Artificial Sequence
  Description of Artificial Sequence: Synthetic oligonucleotide
tacctgggcctcccaagtag

SEQ ID NO: 5220 - DNA, 20 bp, Artificial Sequence
  Description of Artificial Sequence: Synthetic oligonucleotide
acctgggcctcccaagtagc

SEQ ID NO: 5221 - DNA, 20 bp, Artificial Sequence
  Description of Artificial Sequence: Synthetic oligonucleotide
cctgggcctcccaagtagct

SEQ ID NO: 5222 - DNA, 20 bp, Artificial Sequence
  Description of Artificial Sequence: Synthetic oligonucleotide
ctgggcctcccaagtagctg

SEQ ID NO: 5223 - DNA, 20 bp, Artificial Sequence
  Description of Artificial Sequence: Synthetic oligonucleotide
tgggcctcccaagtagctgg

SEQ ID NO: 5224 - DNA, 20 bp, Artificial Sequence
  Description of Artificial Sequence: Synthetic oligonucleotide
gggcctcccaagtagctggg

SEQ ID NO: 5225 - DNA, 20 bp, Artificial Sequence
  Description of Artificial Sequence: Synthetic oligonucleotide
ggcctcccaagtagctggga

SEQ ID NO: 5226 - DNA, 20 bp, Artificial Sequence
  Description of Artificial Sequence: Synthetic oligonucleotide
gcctcccaagtagctgggac

SEQ ID NO: 5227 - DNA, 20 bp, Artificial Sequence
  Description of Artificial Sequence: Synthetic oligonucleotide
cctcccaagtagctgggacc

SEQ ID NO: 5228 - DNA, 20 bp, Artificial Sequence
  Description of Artificial Sequence: Synthetic oligonucleotide
ctcccaagtagctgggacca

SEQ ID NO: 5229 - DNA, 20 bp, Artificial Sequence
  Description of Artificial Sequence: Synthetic oligonucleotide
tcccaagtagctgggaccac

SEQ ID NO: 5230 - DNA, 20 bp, Artificial Sequence
  Description of Artificial Sequence: Synthetic oligonucleotide
cccaagtagctgggaccaca

SEQ ID NO: 5231 - DNA, 20 bp, Artificial Sequence
  Description of Artificial Sequence: Synthetic oligonucleotide
ccaagtagctgggaccacag

SEQ ID NO: 5232 - DNA, 20 bp, Artificial Sequence
  Description of Artificial Sequence: Synthetic oligonucleotide
caagtagctgggaccacagg

SEQ ID NO: 5233 - DNA, 20 bp, Artificial Sequence
  Description of Artificial Sequence: Synthetic oligonucleotide
aagtagctgggaccacaggt

SEQ ID NO: 5234 - DNA, 20 bp, Artificial Sequence
  Description of Artificial Sequence: Synthetic oligonucleotide
agtagctgggaccacaggtg

SEQ ID NO: 5235 - DNA, 20 bp, Artificial Sequence
  Description of Artificial Sequence: Synthetic oligonucleotide
gtagctgggaccacaggtgt

SEQ ID NO: 5236 - DNA, 20 bp, Artificial Sequence
  Description of Artificial Sequence: Synthetic oligonucleotide
tagctgggaccacaggtgtg

SEQ ID NO: 5237 - DNA, 20 bp, Artificial Sequence
  Description of Artificial Sequence: Synthetic oligonucleotide
agctgggaccacaggtgtga

SEQ ID NO: 5238 - DNA, 20 bp, Artificial Sequence
  Description of Artificial Sequence: Synthetic oligonucleotide
gctgggaccacaggtgtgag

SEQ ID NO: 5239 - DNA, 20 bp, Artificial Sequence
  Description of Artificial Sequence: Synthetic oligonucleotide
ctgggaccacaggtgtgagc

SEQ ID NO: 5240 - DNA, 20 bp, Artificial Sequence
  Description of Artificial Sequence: Synthetic oligonucleotide
tgggaccacaggtgtgagcc

SEQ ID NO: 5241 - DNA, 20 bp, Artificial Sequence
  Description of Artificial Sequence: Synthetic oligonucleotide
gggaccacaggtgtgagcca

SEQ ID NO: 5242 - DNA, 20 bp, Artificial Sequence
  Description of Artificial Sequence: Synthetic oligonucleotide
ggaccacaggtgtgagccac

SEQ ID NO: 5243 - DNA, 20 bp, Artificial Sequence
  Description of Artificial Sequence: Synthetic oligonucleotide
gaccacaggtgtgagccacc

SEQ ID NO: 5244 - DNA, 20 bp, Artificial Sequence
  Description of Artificial Sequence: Synthetic oligonucleotide
accacaggtgtgagccacca

SEQ ID NO: 5245 - DNA, 20 bp, Artificial Sequence
  Description of Artificial Sequence: Synthetic oligonucleotide
ccacaggtgtgagccaccat

SEQ ID NO: 5246 - DNA, 20 bp, Artificial Sequence
  Description of Artificial Sequence: Synthetic oligonucleotide
cacaggtgtgagccaccatg

SEQ ID NO: 5247 - DNA, 20 bp, Artificial Sequence
  Description of Artificial Sequence: Synthetic oligonucleotide
acaggtgtgagccaccatgc

SEQ ID NO: 5248 - DNA, 20 bp, Artificial Sequence
  Description of Artificial Sequence: Synthetic oligonucleotide
caggtgtgagccaccatgcc

SEQ ID NO: 5249 - DNA, 20 bp, Artificial Sequence
  Description of Artificial Sequence: Synthetic oligonucleotide
aggtgtgagccaccatgcct

SEQ ID NO: 5250 - DNA, 20 bp, Artificial Sequence
  Description of Artificial Sequence: Synthetic oligonucleotide
ggtgtgagccaccatgcctg

SEQ ID NO: 5251 - DNA, 20 bp, Artificial Sequence
  Description of Artificial Sequence: Synthetic oligonucleotide
gtgtgagccaccatgcctgc

SEQ ID NO: 5252 - DNA, 20 bp, Artificial Sequence
  Description of Artificial Sequence: Synthetic oligonucleotide
tgtgagccaccatgcctgca

SEQ ID NO: 5253 - DNA, 20 bp, Artificial Sequence
  Description of Artificial Sequence: Synthetic oligonucleotide
gtgagccaccatgcctgcat

SEQ ID NO: 5254 - DNA, 20 bp, Artificial Sequence
  Description of Artificial Sequence: Synthetic oligonucleotide
tgagccaccatgcctgcatt

SEQ ID NO: 5255 - DNA, 20 bp, Artificial Sequence
  Description of Artificial Sequence: Synthetic oligonucleotide
gagccaccatgcctgcattt

SEQ ID NO: 5256 - DNA, 20 bp, Artificial Sequence
  Description of Artificial Sequence: Synthetic oligonucleotide
agccaccatgcctgcatttt

SEQ ID NO: 5257 - DNA, 20 bp, Artificial Sequence
  Description of Artificial Sequence: Synthetic oligonucleotide
gccaccatgcctgcattttt

SEQ ID NO: 5258 - DNA, 20 bp, Artificial Sequence
  Description of Artificial Sequence: Synthetic oligonucleotide
ccaccatgcctgcatttttt

SEQ ID NO: 5259 - DNA, 20 bp, Artificial Sequence
  Description of Artificial Sequence: Synthetic oligonucleotide
caccatgcctgcattttttc

SEQ ID NO: 5260 - DNA, 20 bp, Artificial Sequence
  Description of Artificial Sequence: Synthetic oligonucleotide
accatgcctgcattttttct

SEQ ID NO: 5261 - DNA, 20 bp, Artificial Sequence
  Description of Artificial Sequence: Synthetic oligonucleotide
ccatgcctgcattttttctt

SEQ ID NO: 5262 - DNA, 20 bp, Artificial Sequence
  Description of Artificial Sequence: Synthetic oligonucleotide
catgcctgcattttttcttt

SEQ ID NO: 5263 - DNA, 20 bp, Artificial Sequence
  Description of Artificial Sequence: Synthetic oligonucleotide
atgcctgcattttttctttt

SEQ ID NO: 5264 - DNA, 20 bp, Artificial Sequence
  Description of Artificial Sequence: Synthetic oligonucleotide
tgcctgcattttttcttttt

SEQ ID NO: 5265 - DNA, 20 bp, Artificial Sequence
  Description of Artificial Sequence: Synthetic oligonucleotide
gcctgcattttttctttttc

SEQ ID NO: 5266 - DNA, 20 bp, Artificial Sequence
  Description of Artificial Sequence: Synthetic oligonucleotide
cctgcattttttctttttct

SEQ ID NO: 5267 - DNA, 20 bp, Artificial Sequence
  Description of Artificial Sequence: Synthetic oligonucleotide
ctgcattttttctttttctt

SEQ ID NO: 5268 - DNA, 20 bp, Artificial Sequence
  Description of Artificial Sequence: Synthetic oligonucleotide
tgcattttttctttttcttt

SEQ ID NO: 5269 - DNA, 20 bp, Artificial Sequence
  Description of Artificial Sequence: Synthetic oligonucleotide
gcattttttctttttctttt

SEQ ID NO: 5270 - DNA, 20 bp, Artificial Sequence
  Description of Artificial Sequence: Synthetic oligonucleotide
cattttttctttttcttttg

SEQ ID NO: 5271 - DNA, 20 bp, Artificial Sequence
  Description of Artificial Sequence: Synthetic oligonucleotide
attttttctttttcttttga

SEQ ID NO: 5272 - DNA, 20 bp, Artificial Sequence
  Description of Artificial Sequence: Synthetic oligonucleotide
ttttttctttttcttttgag

SEQ ID NO: 5273 - DNA, 20 bp, Artificial Sequence
  Description of Artificial Sequence: Synthetic oligonucleotide
tttttctttttcttttgagg

SEQ ID NO: 5274 - DNA, 20 bp, Artificial Sequence
  Description of Artificial Sequence: Synthetic oligonucleotide
ttttctttttcttttgaggc

SEQ ID NO: 5275 - DNA, 20 bp, Artificial Sequence
  Description of Artificial Sequence: Synthetic oligonucleotide
tttctttttcttttgaggca

SEQ ID NO: 5276 - DNA, 20 bp, Artificial Sequence
  Description of Artificial Sequence: Synthetic oligonucleotide
ttctttttcttttgaggcag

SEQ ID NO: 5277 - DNA, 20 bp, Artificial Sequence
  Description of Artificial Sequence: Synthetic oligonucleotide
tctttttcttttgaggcagg

SEQ ID NO: 5278 - DNA, 20 bp, Artificial Sequence
  Description of Artificial Sequence: Synthetic oligonucleotide
ctttttcttttgaggcaggg

SEQ ID NO: 5279 - DNA, 20 bp, Artificial Sequence
  Description of Artificial Sequence: Synthetic oligonucleotide
tttttcttttgaggcagggg

SEQ ID NO: 5280 - DNA, 20 bp, Artificial Sequence
  Description of Artificial Sequence: Synthetic oligonucleotide
ttttcttttgaggcaggggt

SEQ ID NO: 5281 - DNA, 20 bp, Artificial Sequence
  Description of Artificial Sequence: Synthetic oligonucleotide
tttcttttgaggcaggggtc

SEQ ID NO: 5282 - DNA, 20 bp, Artificial Sequence
  Description of Artificial Sequence: Synthetic oligonucleotide
ttcttttgaggcaggggtct

SEQ ID NO: 5283 - DNA, 20 bp, Artificial Sequence
  Description of Artificial Sequence: Synthetic oligonucleotide
tcttttgaggcaggggtctc

SEQ ID NO: 5284 - DNA, 20 bp, Artificial Sequence
  Description of Artificial Sequence: Synthetic oligonucleotide
cttttgaggcaggggtctca

SEQ ID NO: 5285 - DNA, 20 bp, Artificial Sequence
  Description of Artificial Sequence: Synthetic oligonucleotide
ttttgaggcaggggtctcac

SEQ ID NO: 5286 - DNA, 20 bp, Artificial Sequence
  Description of Artificial Sequence: Synthetic oligonucleotide
tttgaggcaggggtctcact

SEQ ID NO: 5287 - DNA, 20 bp, Artificial Sequence
  Description of Artificial Sequence: Synthetic oligonucleotide
ttgaggcaggggtctcactc

SEQ ID NO: 5288 - DNA, 20 bp, Artificial Sequence
  Description of Artificial Sequence: Synthetic oligonucleotide
tgaggcaggggtctcactct

SEQ ID NO: 5289 - DNA, 20 bp, Artificial Sequence
  Description of Artificial Sequence: Synthetic oligonucleotide
gaggcaggggtctcactctg

SEQ ID NO: 5290 - DNA, 20 bp, Artificial Sequence
  Description of Artificial Sequence: Synthetic oligonucleotide
aggcaggggtctcactctgt

SEQ ID NO: 5291 - DNA, 20 bp, Artificial Sequence
  Description of Artificial Sequence: Synthetic oligonucleotide
ggcaggggtctcactctgtc

SEQ ID NO: 5292 - DNA, 20 bp, Artificial Sequence
  Description of Artificial Sequence: Synthetic oligonucleotide
gcaggggtctcactctgtca

SEQ ID NO: 5293 - DNA, 20 bp, Artificial Sequence
  Description of Artificial Sequence: Synthetic oligonucleotide
caggggtctcactctgtcac

SEQ ID NO: 5294 - DNA, 20 bp, Artificial Sequence
  Description of Artificial Sequence: Synthetic oligonucleotide
aggggtctcactctgtcacc

SEQ ID NO: 5295 - DNA, 20 bp, Artificial Sequence
  Description of Artificial Sequence: Synthetic oligonucleotide
ggggtctcactctgtcaccc

SEQ ID NO: 5296 - DNA, 20 bp, Artificial Sequence
  Description of Artificial Sequence: Synthetic oligonucleotide
gggtctcactctgtcaccca

SEQ ID NO: 5297 - DNA, 20 bp, Artificial Sequence
  Description of Artificial Sequence: Synthetic oligonucleotide
ggtctcactctgtcacccag

SEQ ID NO: 5298 - DNA, 20 bp, Artificial Sequence
  Description of Artificial Sequence: Synthetic oligonucleotide
gtctcactctgtcacccagg

SEQ ID NO: 5299 - DNA, 20 bp, Artificial Sequence
  Description of Artificial Sequence: Synthetic oligonucleotide
tctcactctgtcacccaggc

SEQ ID NO: 5300 - DNA, 20 bp, Artificial Sequence
  Description of Artificial Sequence: Synthetic oligonucleotide
ctcactctgtcacccaggct

SEQ ID NO: 5301 - DNA, 20 bp, Artificial Sequence
  Description of Artificial Sequence: Synthetic oligonucleotide
tcactctgtcacccaggctt

SEQ ID NO: 5302 - DNA, 20 bp, Artificial Sequence
  Description of Artificial Sequence: Synthetic oligonucleotide
cactctgtcacccaggcttg

SEQ ID NO: 5303 - DNA, 20 bp, Artificial Sequence
  Description of Artificial Sequence: Synthetic oligonucleotide
actctgtcacccaggcttga

SEQ ID NO: 5304 - DNA, 20 bp, Artificial Sequence
  Description of Artificial Sequence: Synthetic oligonucleotide
ctctgtcacccaggcttgag

SEQ ID NO: 5305 - DNA, 20 bp, Artificial Sequence
  Description of Artificial Sequence: Synthetic oligonucleotide
tctgtcacccaggcttgagt

SEQ ID NO: 5306 - DNA, 20 bp, Artificial Sequence
  Description of Artificial Sequence: Synthetic oligonucleotide
ctgtcacccaggcttgagtg

SEQ ID NO: 5307 - DNA, 20 bp, Artificial Sequence
  Description of Artificial Sequence: Synthetic oligonucleotide
tgtcacccaggcttgagtgc

SEQ ID NO: 5308 - DNA, 20 bp, Artificial Sequence
  Description of Artificial Sequence: Synthetic oligonucleotide
gtcacccaggcttgagtgca

SEQ ID NO: 5309 - DNA, 20 bp, Artificial Sequence
  Description of Artificial Sequence: Synthetic oligonucleotide
tcacccaggcttgagtgcag

SEQ ID NO: 5310 - DNA, 20 bp, Artificial Sequence
  Description of Artificial Sequence: Synthetic oligonucleotide
cacccaggcttgagtgcagt

SEQ ID NO: 5311 - DNA, 20 bp, Artificial Sequence
  Description of Artificial Sequence: Synthetic oligonucleotide
acccaggcttgagtgcagtg

SEQ ID NO: 5312 - DNA, 20 bp, Artificial Sequence
  Description of Artificial Sequence: Synthetic oligonucleotide
cccaggcttgagtgcagtgg

SEQ ID NO: 5313 - DNA, 20 bp, Artificial Sequence
  Description of Artificial Sequence: Synthetic oligonucleotide
ccaggcttgagtgcagtggc

SEQ ID NO: 5314 - DNA, 20 bp, Artificial Sequence
  Description of Artificial Sequence: Synthetic oligonucleotide
caggcttgagtgcagtggcg

SEQ ID NO: 5315 - DNA, 20 bp, Artificial Sequence
  Description of Artificial Sequence: Synthetic oligonucleotide
aggcttgagtgcagtggcgc

SEQ ID NO: 5316 - DNA, 20 bp, Artificial Sequence
  Description of Artificial Sequence: Synthetic oligonucleotide
ggcttgagtgcagtggcgca

SEQ ID NO: 5317 - DNA, 20 bp, Artificial Sequence
  Description of Artificial Sequence: Synthetic oligonucleotide
gcttgagtgcagtggcgcag

SEQ ID NO: 5318 - DNA, 20 bp, Artificial Sequence
  Description of Artificial Sequence: Synthetic oligonucleotide
cttgagtgcagtggcgcagt

SEQ ID NO: 5319 - DNA, 20 bp, Artificial Sequence
  Description of Artificial Sequence: Synthetic oligonucleotide
ttgagtgcagtggcgcagtc

SEQ ID NO: 5320 - DNA, 20 bp, Artificial Sequence
  Description of Artificial Sequence: Synthetic oligonucleotide
tgagtgcagtggcgcagtct

SEQ ID NO: 5321 - DNA, 20 bp, Artificial Sequence
  Description of Artificial Sequence: Synthetic oligonucleotide
gagtgcagtggcgcagtctc

SEQ ID NO: 5322 - DNA, 20 bp, Artificial Sequence
  Description of Artificial Sequence: Synthetic oligonucleotide
agtgcagtggcgcagtctca

SEQ ID NO: 5323 - DNA, 20 bp, Artificial Sequence
  Description of Artificial Sequence: Synthetic oligonucleotide
gtgcagtggcgcagtctcag

SEQ ID NO: 5324 - DNA, 20 bp, Artificial Sequence
  Description of Artificial Sequence: Synthetic oligonucleotide
tgcagtggcgcagtctcagc

SEQ ID NO: 5325 - DNA, 20 bp, Artificial Sequence
  Description of Artificial Sequence: Synthetic oligonucleotide
gcagtggcgcagtctcagct

SEQ ID NO: 5326 - DNA, 20 bp, Artificial Sequence
  Description of Artificial Sequence: Synthetic oligonucleotide
cagtggcgcagtctcagctc

SEQ ID NO: 5327 - DNA, 20 bp, Artificial Sequence
  Description of Artificial Sequence: Synthetic oligonucleotide
agtggcgcagtctcagctca

SEQ ID NO: 5328 - DNA, 20 bp, Artificial Sequence
  Description of Artificial Sequence: Synthetic oligonucleotide
gtggcgcagtctcagctcac

SEQ ID NO: 5329 - DNA, 20 bp, Artificial Sequence
  Description of Artificial Sequence: Synthetic oligonucleotide
tggcgcagtctcagctcact

SEQ ID NO: 5330 - DNA, 20 bp, Artificial Sequence
  Description of Artificial Sequence: Synthetic oligonucleotide
ggcgcagtctcagctcactg

SEQ ID NO: 5331 - DNA, 20 bp, Artificial Sequence
  Description of Artificial Sequence: Synthetic oligonucleotide
gcgcagtctcagctcactgc

SEQ ID NO: 5332 - DNA, 20 bp, Artificial Sequence
  Description of Artificial Sequence: Synthetic oligonucleotide
cgcagtctcagctcactgca

SEQ ID NO: 5333 - DNA, 20 bp, Artificial Sequence
  Description of Artificial Sequence: Synthetic oligonucleotide
gcagtctcagctcactgcag

SEQ ID NO: 5334 - DNA, 20 bp, Artificial Sequence
  Description of Artificial Sequence: Synthetic oligonucleotide
cagtctcagctcactgcagc

SEQ ID NO: 5335 - DNA, 20 bp, Artificial Sequence
  Description of Artificial Sequence: Synthetic oligonucleotide
agtctcagctcactgcagcc

SEQ ID NO: 5336 - DNA, 20 bp, Artificial Sequence
  Description of Artificial Sequence: Synthetic oligonucleotide
gtctcagctcactgcagcct

SEQ ID NO: 5337 - DNA, 20 bp, Artificial Sequence
  Description of Artificial Sequence: Synthetic oligonucleotide
tctcagctcactgcagcctt

SEQ ID NO: 5338 - DNA, 20 bp, Artificial Sequence
  Description of Artificial Sequence: Synthetic oligonucleotide
ctcagctcactgcagcctta

SEQ ID NO: 5339 - DNA, 20 bp, Artificial Sequence
  Description of Artificial Sequence: Synthetic oligonucleotide
tcagctcactgcagccttat

SEQ ID NO: 5340 - DNA, 20 bp, Artificial Sequence
  Description of Artificial Sequence: Synthetic oligonucleotide
cagctcactgcagccttatc

SEQ ID NO: 5341 - DNA, 20 bp, Artificial Sequence
  Description of Artificial Sequence: Synthetic oligonucleotide
agctcactgcagccttatct

SEQ ID NO: 5342 - DNA, 20 bp, Artificial Sequence
  Description of Artificial Sequence: Synthetic oligonucleotide
gctcactgcagccttatctc

SEQ ID NO: 5343 - DNA, 20 bp, Artificial Sequence
  Description of Artificial Sequence: Synthetic oligonucleotide
ctcactgcagccttatctcc

SEQ ID NO: 5344 - DNA, 20 bp, Artificial Sequence
  Description of Artificial Sequence: Synthetic oligonucleotide
tcactgcagccttatctcct

SEQ ID NO: 5345 - DNA, 20 bp, Artificial Sequence
  Description of Artificial Sequence: Synthetic oligonucleotide
cactgcagccttatctccta

SEQ ID NO: 5346 - DNA, 20 bp, Artificial Sequence
  Description of Artificial Sequence: Synthetic oligonucleotide
actgcagccttatctcctag

SEQ ID NO: 5347 - DNA, 20 bp, Artificial Sequence
  Description of Artificial Sequence: Synthetic oligonucleotide
ctgcagccttatctcctagg

SEQ ID NO: 5348 - DNA, 20 bp, Artificial Sequence
  Description of Artificial Sequence: Synthetic oligonucleotide
tgcagccttatctcctaggc

SEQ ID NO: 5349 - DNA, 20 bp, Artificial Sequence
  Description of Artificial Sequence: Synthetic oligonucleotide
gcagccttatctcctaggct

SEQ ID NO: 5350 - DNA, 20 bp, Artificial Sequence
  Description of Artificial Sequence: Synthetic oligonucleotide
cagccttatctcctaggctc

SEQ ID NO: 5351 - DNA, 20 bp, Artificial Sequence
  Description of Artificial Sequence: Synthetic oligonucleotide
agccttatctcctaggctca

SEQ ID NO: 5352 - DNA, 20 bp, Artificial Sequence
  Description of Artificial Sequence: Synthetic oligonucleotide
gccttatctcctaggctcaa

SEQ ID NO: 5353 - DNA, 20 bp, Artificial Sequence
  Description of Artificial Sequence: Synthetic oligonucleotide
ccttatctcctaggctcaag

SEQ ID NO: 5354 - DNA, 20 bp, Artificial Sequence
  Description of Artificial Sequence: Synthetic oligonucleotide
cttatctcctaggctcaaga

SEQ ID NO: 5355 - DNA, 20 bp, Artificial Sequence
  Description of Artificial Sequence: Synthetic oligonucleotide
ttatctcctaggctcaagag

SEQ ID NO: 5356 - DNA, 20 bp, Artificial Sequence
  Description of Artificial Sequence: Synthetic oligonucleotide
tatctcctaggctcaagaga

SEQ ID NO: 5357 - DNA, 20 bp, Artificial Sequence
  Description of Artificial Sequence: Synthetic oligonucleotide
atctcctaggctcaagagat

SEQ ID NO: 5358 - DNA, 20 bp, Artificial Sequence
  Description of Artificial Sequence: Synthetic oligonucleotide
tctcctaggctcaagagatc

SEQ ID NO: 5359 - DNA, 20 bp, Artificial Sequence
  Description of Artificial Sequence: Synthetic oligonucleotide
ctcctaggctcaagagatcc

SEQ ID NO: 5360 - DNA, 20 bp, Artificial Sequence
  Description of Artificial Sequence: Synthetic oligonucleotide
tcctaggctcaagagatcct

SEQ ID NO: 5361 - DNA, 20 bp, Artificial Sequence
  Description of Artificial Sequence: Synthetic oligonucleotide
cctaggctcaagagatcctc

SEQ ID NO: 5362 - DNA, 20 bp, Artificial Sequence
  Description of Artificial Sequence: Synthetic oligonucleotide
ctaggctcaagagatcctcc

SEQ ID NO: 5363 - DNA, 20 bp, Artificial Sequence
  Description of Artificial Sequence: Synthetic oligonucleotide
taggctcaagagatcctccc

SEQ ID NO: 5364 - DNA, 20 bp, Artificial Sequence
  Description of Artificial Sequence: Synthetic oligonucleotide
aggctcaagagatcctccca

SEQ ID NO: 5365 - DNA, 20 bp, Artificial Sequence
  Description of Artificial Sequence: Synthetic oligonucleotide
ggctcaagagatcctcccaa

SEQ ID NO: 5366 - DNA, 20 bp, Artificial Sequence
  Description of Artificial Sequence: Synthetic oligonucleotide
gctcaagagatcctcccaac

SEQ ID NO: 5367 - DNA, 20 bp, Artificial Sequence
  Description of Artificial Sequence: Synthetic oligonucleotide
ctcaagagatcctcccaact

SEQ ID NO: 5368 - DNA, 20 bp, Artificial Sequence
  Description of Artificial Sequence: Synthetic oligonucleotide
tcaagagatcctcccaactc

SEQ ID NO: 5369 - DNA, 20 bp, Artificial Sequence
  Description of Artificial Sequence: Synthetic oligonucleotide
caagagatcctcccaactca

SEQ ID NO: 5370 - DNA, 20 bp, Artificial Sequence
  Description of Artificial Sequence: Synthetic oligonucleotide
aagagatcctcccaactcag

SEQ ID NO: 5371 - DNA, 20 bp, Artificial Sequence
  Description of Artificial Sequence: Synthetic oligonucleotide
agagatcctcccaactcagc

SEQ ID NO: 5372 - DNA, 20 bp, Artificial Sequence
  Description of Artificial Sequence: Synthetic oligonucleotide
gagatcctcccaactcagcc

SEQ ID NO: 5373 - DNA, 20 bp, Artificial Sequence
  Description of Artificial Sequence: Synthetic oligonucleotide
agatcctcccaactcagcct

SEQ ID NO: 5374 - DNA, 20 bp, Artificial Sequence
  Description of Artificial Sequence: Synthetic oligonucleotide
gatcctcccaactcagcctc

SEQ ID NO: 5375 - DNA, 20 bp, Artificial Sequence
  Description of Artificial Sequence: Synthetic oligonucleotide
atcctcccaactcagcctcc

SEQ ID NO: 5376 - DNA, 20 bp, Artificial Sequence
  Description of Artificial Sequence: Synthetic oligonucleotide
tcctcccaactcagcctccc

SEQ ID NO: 5377 - DNA, 20 bp, Artificial Sequence
  Description of Artificial Sequence: Synthetic oligonucleotide
cctcccaactcagcctccca

SEQ ID NO: 5378 - DNA, 20 bp, Artificial Sequence
  Description of Artificial Sequence: Synthetic oligonucleotide
ctcccaactcagcctcccaa

SEQ ID NO: 5379 - DNA, 20 bp, Artificial Sequence
  Description of Artificial Sequence: Synthetic oligonucleotide
tcccaactcagcctcccaag

SEQ ID NO: 5380 - DNA, 20 bp, Artificial Sequence
  Description of Artificial Sequence: Synthetic oligonucleotide
cccaactcagcctcccaagt

SEQ ID NO: 5381 - DNA, 20 bp, Artificial Sequence
  Description of Artificial Sequence: Synthetic oligonucleotide
ccaactcagcctcccaagta

SEQ ID NO: 5382 - DNA, 20 bp, Artificial Sequence
  Description of Artificial Sequence: Synthetic oligonucleotide
caactcagcctcccaagtag

SEQ ID NO: 5383 - DNA, 20 bp, Artificial Sequence
  Description of Artificial Sequence: Synthetic oligonucleotide
aactcagcctcccaagtaga

SEQ ID NO: 5384 - DNA, 20 bp, Artificial Sequence
  Description of Artificial Sequence: Synthetic oligonucleotide
actcagcctcccaagtagat

SEQ ID NO: 5385 - DNA, 20 bp, Artificial Sequence
  Description of Artificial Sequence: Synthetic oligonucleotide
ctcagcctcccaagtagatg

SEQ ID NO: 5386 - DNA, 20 bp, Artificial Sequence
  Description of Artificial Sequence: Synthetic oligonucleotide
tcagcctcccaagtagatgg

SEQ ID NO: 5387 - DNA, 20 bp, Artificial Sequence
  Description of Artificial Sequence: Synthetic oligonucleotide
cagcctcccaagtagatggg

SEQ ID NO: 5388 - DNA, 20 bp, Artificial Sequence
  Description of Artificial Sequence: Synthetic oligonucleotide
agcctcccaagtagatggga

SEQ ID NO: 5389 - DNA, 20 bp, Artificial Sequence
  Description of Artificial Sequence: Synthetic oligonucleotide
gcctcccaagtagatgggaa

SEQ ID NO: 5390 - DNA, 20 bp, Artificial Sequence
  Description of Artificial Sequence: Synthetic oligonucleotide
cctcccaagtagatgggaac

SEQ ID NO: 5391 - DNA, 20 bp, Artificial Sequence
  Description of Artificial Sequence: Synthetic oligonucleotide
ctcccaagtagatgggaaca

SEQ ID NO: 5392 - DNA, 20 bp, Artificial Sequence
  Description of Artificial Sequence: Synthetic oligonucleotide
tcccaagtagatgggaacac

SEQ ID NO: 5393 - DNA, 20 bp, Artificial Sequence
  Description of Artificial Sequence: Synthetic oligonucleotide
cccaagtagatgggaacaca

SEQ ID NO: 5394 - DNA, 20 bp, Artificial Sequence
  Description of Artificial Sequence: Synthetic oligonucleotide
ccaagtagatgggaacacag

SEQ ID NO: 5395 - DNA, 20 bp, Artificial Sequence
  Description of Artificial Sequence: Synthetic oligonucleotide
caagtagatgggaacacagg

SEQ ID NO: 5396 - DNA, 20 bp, Artificial Sequence
  Description of Artificial Sequence: Synthetic oligonucleotide
aagtagatgggaacacaggc

SEQ ID NO: 5397 - DNA, 20 bp, Artificial Sequence
  Description of Artificial Sequence: Synthetic oligonucleotide
agtagatgggaacacaggca

SEQ ID NO: 5398 - DNA, 20 bp, Artificial Sequence
  Description of Artificial Sequence: Synthetic oligonucleotide
gtagatgggaacacaggcag

SEQ ID NO: 5399 - DNA, 20 bp, Artificial Sequence
  Description of Artificial Sequence: Synthetic oligonucleotide
tagatgggaacacaggcagg

SEQ ID NO: 5400 - DNA, 20 bp, Artificial Sequence
  Description of Artificial Sequence: Synthetic oligonucleotide
agatgggaacacaggcaggc

SEQ ID NO: 5401 - DNA, 20 bp, Artificial Sequence
  Description of Artificial Sequence: Synthetic oligonucleotide
gatgggaacacaggcaggca

SEQ ID NO: 5402 - DNA, 20 bp, Artificial Sequence
  Description of Artificial Sequence: Synthetic oligonucleotide
atgggaacacaggcaggcac

SEQ ID NO: 5403 - DNA, 20 bp, Artificial Sequence
  Description of Artificial Sequence: Synthetic oligonucleotide
tgggaacacaggcaggcacc

SEQ ID NO: 5404 - DNA, 20 bp, Artificial Sequence
  Description of Artificial Sequence: Synthetic oligonucleotide
gggaacacaggcaggcacca

SEQ ID NO: 5405 - DNA, 20 bp, Artificial Sequence
  Description of Artificial Sequence: Synthetic oligonucleotide
ggaacacaggcaggcaccac

SEQ ID NO: 5406 - DNA, 20 bp, Artificial Sequence
  Description of Artificial Sequence: Synthetic oligonucleotide
gaacacaggcaggcaccacc

SEQ ID NO: 5407 - DNA, 20 bp, Artificial Sequence
  Description of Artificial Sequence: Synthetic oligonucleotide
aacacaggcaggcaccacca

SEQ ID NO: 5408 - DNA, 20 bp, Artificial Sequence
  Description of Artificial Sequence: Synthetic oligonucleotide
acacaggcaggcaccaccat

SEQ ID NO: 5409 - DNA, 20 bp, Artificial Sequence
  Description of Artificial Sequence: Synthetic oligonucleotide
cacaggcaggcaccaccatg

SEQ ID NO: 5410 - DNA, 20 bp, Artificial Sequence
  Description of Artificial Sequence: Synthetic oligonucleotide
acaggcaggcaccaccatgc

SEQ ID NO: 5411 - DNA, 20 bp, Artificial Sequence
  Description of Artificial Sequence: Synthetic oligonucleotide
caggcaggcaccaccatgcc

SEQ ID NO: 5412 - DNA, 20 bp, Artificial Sequence
  Description of Artificial Sequence: Synthetic oligonucleotide
aggcaggcaccaccatgccc

SEQ ID NO: 5413 - DNA, 20 bp, Artificial Sequence
  Description of Artificial Sequence: Synthetic oligonucleotide
ggcaggcaccaccatgccca

SEQ ID NO: 5414 - DNA, 20 bp, Artificial Sequence
  Description of Artificial Sequence: Synthetic oligonucleotide
gcaggcaccaccatgcccag

SEQ ID NO: 5415 - DNA, 20 bp, Artificial Sequence
  Description of Artificial Sequence: Synthetic oligonucleotide
caggcaccaccatgcccagc

SEQ ID NO: 5416 - DNA, 20 bp, Artificial Sequence
  Description of Artificial Sequence: Synthetic oligonucleotide
aggcaccaccatgcccagct

SEQ ID NO: 5417 - DNA, 20 bp, Artificial Sequence
  Description of Artificial Sequence: Synthetic oligonucleotide
ggcaccaccatgcccagcta

SEQ ID NO: 5418 - DNA, 20 bp, Artificial Sequence
  Description of Artificial Sequence: Synthetic oligonucleotide
gcaccaccatgcccagctag

SEQ ID NO: 5419 - DNA, 20 bp, Artificial Sequence
  Description of Artificial Sequence: Synthetic oligonucleotide
caccaccatgcccagctagt

SEQ ID NO: 5420 - DNA, 20 bp, Artificial Sequence
  Description of Artificial Sequence: Synthetic oligonucleotide
accaccatgcccagctagtt

SEQ ID NO: 5421 - DNA, 20 bp, Artificial Sequence
  Description of Artificial Sequence: Synthetic oligonucleotide
ccaccatgcccagctagttt

SEQ ID NO: 5422 - DNA, 20 bp, Artificial Sequence
  Description of Artificial Sequence: Synthetic oligonucleotide
caccatgcccagctagtttt

SEQ ID NO: 5423 - DNA, 20 bp, Artificial Sequence
  Description of Artificial Sequence: Synthetic oligonucleotide
accatgcccagctagttttt

SEQ ID NO: 5424 - DNA, 20 bp, Artificial Sequence
  Description of Artificial Sequence: Synthetic oligonucleotide
ccatgcccagctagtttttt

SEQ ID NO: 5425 - DNA, 20 bp, Artificial Sequence
  Description of Artificial Sequence: Synthetic oligonucleotide
catgcccagctagttttttg

SEQ ID NO: 5426 - DNA, 20 bp, Artificial Sequence
  Description of Artificial Sequence: Synthetic oligonucleotide
atgcccagctagttttttgt

SEQ ID NO: 5427 - DNA, 20 bp, Artificial Sequence
  Description of Artificial Sequence: Synthetic oligonucleotide
tgcccagctagttttttgta

SEQ ID NO: 5428 - DNA, 20 bp, Artificial Sequence
  Description of Artificial Sequence: Synthetic oligonucleotide
gcccagctagttttttgtat

SEQ ID NO: 5429 - DNA, 20 bp, Artificial Sequence
  Description of Artificial Sequence: Synthetic oligonucleotide
cccagctagttttttgtatt

SEQ ID NO: 5430 - DNA, 20 bp, Artificial Sequence
  Description of Artificial Sequence: Synthetic oligonucleotide
ccagctagttttttgtattt

SEQ ID NO: 5431 - DNA, 20 bp, Artificial Sequence
  Description of Artificial Sequence: Synthetic oligonucleotide
cagctagttttttgtatttt

SEQ ID NO: 5432 - DNA, 20 bp, Artificial Sequence
  Description of Artificial Sequence: Synthetic oligonucleotide
agctagttttttgtattttt

SEQ ID NO: 5433 - DNA, 20 bp, Artificial Sequence
  Description of Artificial Sequence: Synthetic oligonucleotide
gctagttttttgtattttta

SEQ ID NO: 5434 - DNA, 20 bp, Artificial Sequence
  Description of Artificial Sequence: Synthetic oligonucleotide
ctagttttttgtatttttaa

SEQ ID NO: 5435 - DNA, 20 bp, Artificial Sequence
  Description of Artificial Sequence: Synthetic oligonucleotide
tagttttttgtatttttaat

SEQ ID NO: 5436 - DNA, 20 bp, Artificial Sequence
  Description of Artificial Sequence: Synthetic oligonucleotide
agttttttgtatttttaatt

SEQ ID NO: 5437 - DNA, 20 bp, Artificial Sequence
  Description of Artificial Sequence: Synthetic oligonucleotide
gttttttgtatttttaattg

SEQ ID NO: 5438 - DNA, 20 bp, Artificial Sequence
  Description of Artificial Sequence: Synthetic oligonucleotide
ttttttgtatttttaattga

SEQ ID NO: 5439 - DNA, 20 bp, Artificial Sequence
  Description of Artificial Sequence: Synthetic oligonucleotide
tttttgtatttttaattgag

SEQ ID NO: 5440 - DNA, 20 bp, Artificial Sequence
  Description of Artificial Sequence: Synthetic oligonucleotide
ttttgtatttttaattgaga

SEQ ID NO: 5441 - DNA, 20 bp, Artificial Sequence
  Description of Artificial Sequence: Synthetic oligonucleotide
tttgtatttttaattgagac

SEQ ID NO: 5442 - DNA, 20 bp, Artificial Sequence
  Description of Artificial Sequence: Synthetic oligonucleotide
ttgtatttttaattgagaca

SEQ ID NO: 5443 - DNA, 20 bp, Artificial Sequence
  Description of Artificial Sequence: Synthetic oligonucleotide
tgtatttttaattgagacag

SEQ ID NO: 5444 - DNA, 20 bp, Artificial Sequence
  Description of Artificial Sequence: Synthetic oligonucleotide
gtatttttaattgagacagg

SEQ ID NO: 5445 - DNA, 20 bp, Artificial Sequence
  Description of Artificial Sequence: Synthetic oligonucleotide
tatttttaattgagacagga

SEQ ID NO: 5446 - DNA, 20 bp, Artificial Sequence
  Description of Artificial Sequence: Synthetic oligonucleotide
atttttaattgagacaggat

SEQ ID NO: 5447 - DNA, 20 bp, Artificial Sequence
  Description of Artificial Sequence: Synthetic oligonucleotide
tttttaattgagacaggatt

SEQ ID NO: 5448 - DNA, 20 bp, Artificial Sequence
  Description of Artificial Sequence: Synthetic oligonucleotide
ttttaattgagacaggattt

SEQ ID NO: 5449 - DNA, 20 bp, Artificial Sequence
  Description of Artificial Sequence: Synthetic oligonucleotide
tttaattgagacaggatttc

SEQ ID NO: 5450 - DNA, 20 bp, Artificial Sequence
  Description of Artificial Sequence: Synthetic oligonucleotide
ttaattgagacaggatttcg

SEQ ID NO: 5451 - DNA, 20 bp, Artificial Sequence
  Description of Artificial Sequence: Synthetic oligonucleotide
taattgagacaggatttcgc

SEQ ID NO: 5452 - DNA, 20 bp, Artificial Sequence
  Description of Artificial Sequence: Synthetic oligonucleotide
aattgagacaggatttcgcc

SEQ ID NO: 5453 - DNA, 20 bp, Artificial Sequence
  Description of Artificial Sequence: Synthetic oligonucleotide
attgagacaggatttcgccc

SEQ ID NO: 5454 - DNA, 20 bp, Artificial Sequence
  Description of Artificial Sequence: Synthetic oligonucleotide
ttgagacaggatttcgccct

SEQ ID NO: 5455 - DNA, 20 bp, Artificial Sequence
  Description of Artificial Sequence: Synthetic oligonucleotide
tgagacaggatttcgccctg

SEQ ID NO: 5456 - DNA, 20 bp, Artificial Sequence
  Description of Artificial Sequence: Synthetic oligonucleotide
gagacaggatttcgccctgt

SEQ ID NO: 5457 - DNA, 20 bp, Artificial Sequence
  Description of Artificial Sequence: Synthetic oligonucleotide
agacaggatttcgccctgtt

SEQ ID NO: 5458 - DNA, 20 bp, Artificial Sequence
  Description of Artificial Sequence: Synthetic oligonucleotide
gacaggatttcgccctgttg

SEQ ID NO: 5459 - DNA, 20 bp, Artificial Sequence
  Description of Artificial Sequence: Synthetic oligonucleotide
acaggatttcgccctgttgc

SEQ ID NO: 5460 - DNA, 20 bp, Artificial Sequence
  Description of Artificial Sequence: Synthetic oligonucleotide
caggatttcgccctgttgct

SEQ ID NO: 5461 - DNA, 20 bp, Artificial Sequence
  Description of Artificial Sequence: Synthetic oligonucleotide
aggatttcgccctgttgctc

SEQ ID NO: 5462 - DNA, 20 bp, Artificial Sequence
  Description of Artificial Sequence: Synthetic oligonucleotide
ggatttcgccctgttgctca

SEQ ID NO: 5463 - DNA, 20 bp, Artificial Sequence
  Description of Artificial Sequence: Synthetic oligonucleotide
gatttcgccctgttgctcag

SEQ ID NO: 5464 - DNA, 20 bp, Artificial Sequence
  Description of Artificial Sequence: Synthetic oligonucleotide
atttcgccctgttgctcaga

SEQ ID NO: 5465 - DNA, 20 bp, Artificial Sequence
  Description of Artificial Sequence: Synthetic oligonucleotide
tttcgccctgttgctcagat

SEQ ID NO: 5466 - DNA, 20 bp, Artificial Sequence
  Description of Artificial Sequence: Synthetic oligonucleotide
ttcgccctgttgctcagatt

SEQ ID NO: 5467 - DNA, 20 bp, Artificial Sequence
  Description of Artificial Sequence: Synthetic oligonucleotide
tcgccctgttgctcagattg

SEQ ID NO: 5468 - DNA, 20 bp, Artificial Sequence
  Description of Artificial Sequence: Synthetic oligonucleotide
cgccctgttgctcagattgg

SEQ ID NO: 5469 - DNA, 20 bp, Artificial Sequence
  Description of Artificial Sequence: Synthetic oligonucleotide
gccctgttgctcagattggt

SEQ ID NO: 5470 - DNA, 20 bp, Artificial Sequence
  Description of Artificial Sequence: Synthetic oligonucleotide
ccctgttgctcagattggtc

SEQ ID NO: 5471 - DNA, 20 bp, Artificial Sequence
  Description of Artificial Sequence: Synthetic oligonucleotide
cctgttgctcagattggtct

SEQ ID NO: 5472 - DNA, 20 bp, Artificial Sequence
  Description of Artificial Sequence: Synthetic oligonucleotide
ctgttgctcagattggtctc

SEQ ID NO: 5473 - DNA, 20 bp, Artificial Sequence
  Description of Artificial Sequence: Synthetic oligonucleotide
tgttgctcagattggtctcc

SEQ ID NO: 5474 - DNA, 20 bp, Artificial Sequence
  Description of Artificial Sequence: Synthetic oligonucleotide
gttgctcagattggtctcct

SEQ ID NO: 5475 - DNA, 20 bp, Artificial Sequence
  Description of Artificial Sequence: Synthetic oligonucleotide
ttgctcagattggtctcctg

SEQ ID NO: 5476 - DNA, 20 bp, Artificial Sequence
  Description of Artificial Sequence: Synthetic oligonucleotide
tgctcagattggtctcctgg

SEQ ID NO: 5477 - DNA, 20 bp, Artificial Sequence
  Description of Artificial Sequence: Synthetic oligonucleotide
gctcagattggtctcctggg

SEQ ID NO: 5478 - DNA, 20 bp, Artificial Sequence
  Description of Artificial Sequence: Synthetic oligonucleotide
ctcagattggtctcctgggc

SEQ ID NO: 5479 - DNA, 20 bp, Artificial Sequence
  Description of Artificial Sequence: Synthetic oligonucleotide
tcagattggtctcctgggct

SEQ ID NO: 5480 - DNA, 20 bp, Artificial Sequence
  Description of Artificial Sequence: Synthetic oligonucleotide
cagattggtctcctgggctc

SEQ ID NO: 5481 - DNA, 20 bp, Artificial Sequence
  Description of Artificial Sequence: Synthetic oligonucleotide
agattggtctcctgggctca

SEQ ID NO: 5482 - DNA, 20 bp, Artificial Sequence
  Description of Artificial Sequence: Synthetic oligonucleotide
gattggtctcctgggctcaa

SEQ ID NO: 5483 - DNA, 20 bp, Artificial Sequence
  Description of Artificial Sequence: Synthetic oligonucleotide
attggtctcctgggctcaag

SEQ ID NO: 5484 - DNA, 20 bp, Artificial Sequence
  Description of Artificial Sequence: Synthetic oligonucleotide
ttggtctcctgggctcaagt

SEQ ID NO: 5485 - DNA, 20 bp, Artificial Sequence
  Description of Artificial Sequence: Synthetic oligonucleotide
tggtctcctgggctcaagtg

SEQ ID NO: 5486 - DNA, 20 bp, Artificial Sequence
  Description of Artificial Sequence: Synthetic oligonucleotide
ggtctcctgggctcaagtga

SEQ ID NO: 5487 - DNA, 20 bp, Artificial Sequence
  Description of Artificial Sequence: Synthetic oligonucleotide
gtctcctgggctcaagtgat

SEQ ID NO: 5488 - DNA, 20 bp, Artificial Sequence
  Description of Artificial Sequence: Synthetic oligonucleotide
tctcctgggctcaagtgatc

SEQ ID NO: 5489 - DNA, 20 bp, Artificial Sequence
  Description of Artificial Sequence: Synthetic oligonucleotide
ctcctgggctcaagtgatcc

SEQ ID NO: 5490 - DNA, 20 bp, Artificial Sequence
  Description of Artificial Sequence: Synthetic oligonucleotide
tcctgggctcaagtgatcca

SEQ ID NO: 5491 - DNA, 20 bp, Artificial Sequence
  Description of Artificial Sequence: Synthetic oligonucleotide
cctgggctcaagtgatccac

SEQ ID NO: 5492 - DNA, 20 bp, Artificial Sequence
  Description of Artificial Sequence: Synthetic oligonucleotide
ctgggctcaagtgatccact

SEQ ID NO: 5493 - DNA, 20 bp, Artificial Sequence
  Description of Artificial Sequence: Synthetic oligonucleotide
tgggctcaagtgatccactc

SEQ ID NO: 5494 - DNA, 20 bp, Artificial Sequence
  Description of Artificial Sequence: Synthetic oligonucleotide
gggctcaagtgatccactcg

SEQ ID NO: 5495 - DNA, 20 bp, Artificial Sequence
  Description of Artificial Sequence: Synthetic oligonucleotide
ggctcaagtgatccactcgc

SEQ ID NO: 5496 - DNA, 20 bp, Artificial Sequence
  Description of Artificial Sequence: Synthetic oligonucleotide
gctcaagtgatccactcgct

SEQ ID NO: 5497 - DNA, 20 bp, Artificial Sequence
  Description of Artificial Sequence: Synthetic oligonucleotide
ctcaagtgatccactcgctt

SEQ ID NO: 5498 - DNA, 20 bp, Artificial Sequence
  Description of Artificial Sequence: Synthetic oligonucleotide
tcaagtgatccactcgcttc

SEQ ID NO: 5499 - DNA, 20 bp, Artificial Sequence
  Description of Artificial Sequence: Synthetic oligonucleotide
caagtgatccactcgcttca

SEQ ID NO: 5500 - DNA, 20 bp, Artificial Sequence
  Description of Artificial Sequence: Synthetic oligonucleotide
aagtgatccactcgcttcag

SEQ ID NO: 5501 - DNA, 20 bp, Artificial Sequence
  Description of Artificial Sequence: Synthetic oligonucleotide
agtgatccactcgcttcagc

SEQ ID NO: 5502 - DNA, 20 bp, Artificial Sequence
  Description of Artificial Sequence: Synthetic oligonucleotide
gtgatccactcgcttcagcc

SEQ ID NO: 5503 - DNA, 20 bp, Artificial Sequence
  Description of Artificial Sequence: Synthetic oligonucleotide
tgatccactcgcttcagcct

SEQ ID NO: 5504 - DNA, 20 bp, Artificial Sequence
  Description of Artificial Sequence: Synthetic oligonucleotide
gatccactcgcttcagcctc

SEQ ID NO: 5505 - DNA, 20 bp, Artificial Sequence
  Description of Artificial Sequence: Synthetic oligonucleotide
atccactcgcttcagcctcc

SEQ ID NO: 5506 - DNA, 20 bp, Artificial Sequence
  Description of Artificial Sequence: Synthetic oligonucleotide
tccactcgcttcagcctccc

SEQ ID NO: 5507 - DNA, 20 bp, Artificial Sequence
  Description of Artificial Sequence: Synthetic oligonucleotide
ccactcgcttcagcctccca

SEQ ID NO: 5508 - DNA, 20 bp, Artificial Sequence
  Description of Artificial Sequence: Synthetic oligonucleotide
cactcgcttcagcctcccaa

SEQ ID NO: 5509 - DNA, 20 bp, Artificial Sequence
  Description of Artificial Sequence: Synthetic oligonucleotide
actcgcttcagcctcccaaa

SEQ ID NO: 5510 - DNA, 20 bp, Artificial Sequence
  Description of Artificial Sequence: Synthetic oligonucleotide
ctcgcttcagcctcccaaag

SEQ ID NO: 5511 - DNA, 20 bp, Artificial Sequence
  Description of Artificial Sequence: Synthetic oligonucleotide
tcgcttcagcctcccaaagt

SEQ ID NO: 5512 - DNA, 20 bp, Artificial Sequence
  Description of Artificial Sequence: Synthetic oligonucleotide
cgcttcagcctcccaaagtg

SEQ ID NO: 5513 - DNA, 20 bp, Artificial Sequence
  Description of Artificial Sequence: Synthetic oligonucleotide
gcttcagcctcccaaagtgc

SEQ ID NO: 5514 - DNA, 20 bp, Artificial Sequence
  Description of Artificial Sequence: Synthetic oligonucleotide
cttcagcctcccaaagtgct

SEQ ID NO: 5515 - DNA, 20 bp, Artificial Sequence
  Description of Artificial Sequence: Synthetic oligonucleotide
ttcagcctcccaaagtgctg

SEQ ID NO: 5516 - DNA, 20 bp, Artificial Sequence
  Description of Artificial Sequence: Synthetic oligonucleotide
tcagcctcccaaagtgctgg

SEQ ID NO: 5517 - DNA, 20 bp, Artificial Sequence
  Description of Artificial Sequence: Synthetic oligonucleotide
cagcctcccaaagtgctggg

SEQ ID NO: 5518 - DNA, 20 bp, Artificial Sequence
  Description of Artificial Sequence: Synthetic oligonucleotide
agcctcccaaagtgctggga

SEQ ID NO: 5519 - DNA, 20 bp, Artificial Sequence
  Description of Artificial Sequence: Synthetic oligonucleotide
gcctcccaaagtgctgggat

SEQ ID NO: 5520 - DNA, 20 bp, Artificial Sequence
  Description of Artificial Sequence: Synthetic oligonucleotide
cctcccaaagtgctgggatt

SEQ ID NO: 5521 - DNA, 20 bp, Artificial Sequence
  Description of Artificial Sequence: Synthetic oligonucleotide
ctcccaaagtgctgggattg

SEQ ID NO: 5522 - DNA, 20 bp, Artificial Sequence
  Description of Artificial Sequence: Synthetic oligonucleotide
tcccaaagtgctgggattgc

SEQ ID NO: 5523 - DNA, 20 bp, Artificial Sequence
  Description of Artificial Sequence: Synthetic oligonucleotide
cccaaagtgctgggattgca

SEQ ID NO: 5524 - DNA, 20 bp, Artificial Sequence
  Description of Artificial Sequence: Synthetic oligonucleotide
ccaaagtgctgggattgcaa

SEQ ID NO: 5525 - DNA, 20 bp, Artificial Sequence
  Description of Artificial Sequence: Synthetic oligonucleotide
caaagtgctgggattgcaag

SEQ ID NO: 5526 - DNA, 20 bp, Artificial Sequence
  Description of Artificial Sequence: Synthetic oligonucleotide
aaagtgctgggattgcaagt

SEQ ID NO: 5527 - DNA, 20 bp, Artificial Sequence
  Description of Artificial Sequence: Synthetic oligonucleotide
aagtgctgggattgcaagtg

SEQ ID NO: 5528 - DNA, 20 bp, Artificial Sequence
  Description of Artificial Sequence: Synthetic oligonucleotide
agtgctgggattgcaagtgt

SEQ ID NO: 5529 - DNA, 20 bp, Artificial Sequence
  Description of Artificial Sequence: Synthetic oligonucleotide
gtgctgggattgcaagtgtg

SEQ ID NO: 5530 - DNA, 20 bp, Artificial Sequence
  Description of Artificial Sequence: Synthetic oligonucleotide
tgctgggattgcaagtgtga

SEQ ID NO: 5531 - DNA, 20 bp, Artificial Sequence
  Description of Artificial Sequence: Synthetic oligonucleotide
gctgggattgcaagtgtgag

SEQ ID NO: 5532 - DNA, 20 bp, Artificial Sequence
  Description of Artificial Sequence: Synthetic oligonucleotide
ctgggattgcaagtgtgagc

SEQ ID NO: 5533 - DNA, 20 bp, Artificial Sequence
  Description of Artificial Sequence: Synthetic oligonucleotide
tgggattgcaagtgtgagcc

SEQ ID NO: 5534 - DNA, 20 bp, Artificial Sequence
  Description of Artificial Sequence: Synthetic oligonucleotide
gggattgcaagtgtgagcca

SEQ ID NO: 5535 - DNA, 20 bp, Artificial Sequence
  Description of Artificial Sequence: Synthetic oligonucleotide
ggattgcaagtgtgagccac

SEQ ID NO: 5536 - DNA, 20 bp, Artificial Sequence
  Description of Artificial Sequence: Synthetic oligonucleotide
gattgcaagtgtgagccacc

SEQ ID NO: 5537 - DNA, 20 bp, Artificial Sequence
  Description of Artificial Sequence: Synthetic oligonucleotide
attgcaagtgtgagccaccg

SEQ ID NO: 5538 - DNA, 20 bp, Artificial Sequence
  Description of Artificial Sequence: Synthetic oligonucleotide
ttgcaagtgtgagccaccgt

SEQ ID NO: 5539 - DNA, 20 bp, Artificial Sequence
  Description of Artificial Sequence: Synthetic oligonucleotide
tgcaagtgtgagccaccgtg

SEQ ID NO: 5540 - DNA, 20 bp, Artificial Sequence
  Description of Artificial Sequence: Synthetic oligonucleotide
gcaagtgtgagccaccgtgc

SEQ ID NO: 5541 - DNA, 20 bp, Artificial Sequence
  Description of Artificial Sequence: Synthetic oligonucleotide
caagtgtgagccaccgtgcc

SEQ ID NO: 5542 - DNA, 20 bp, Artificial Sequence
  Description of Artificial Sequence: Synthetic oligonucleotide
aagtgtgagccaccgtgcct

SEQ ID NO: 5543 - DNA, 20 bp, Artificial Sequence
  Description of Artificial Sequence: Synthetic oligonucleotide
agtgtgagccaccgtgccta

SEQ ID NO: 5544 - DNA, 20 bp, Artificial Sequence
  Description of Artificial Sequence: Synthetic oligonucleotide
gtgtgagccaccgtgcctaa

SEQ ID NO: 5545 - DNA, 20 bp, Artificial Sequence
  Description of Artificial Sequence: Synthetic oligonucleotide
tgtgagccaccgtgcctaat

SEQ ID NO: 5546 - DNA, 20 bp, Artificial Sequence
  Description of Artificial Sequence: Synthetic oligonucleotide
gtgagccaccgtgcctaatt

SEQ ID NO: 5547 - DNA, 20 bp, Artificial Sequence
  Description of Artificial Sequence: Synthetic oligonucleotide
tgagccaccgtgcctaattt

SEQ ID NO: 5548 - DNA, 20 bp, Artificial Sequence
  Description of Artificial Sequence: Synthetic oligonucleotide
gagccaccgtgcctaatttt

SEQ ID NO: 5549 - DNA, 20 bp, Artificial Sequence
  Description of Artificial Sequence: Synthetic oligonucleotide
agccaccgtgcctaattttt

SEQ ID NO: 5550 - DNA, 20 bp, Artificial Sequence
  Description of Artificial Sequence: Synthetic oligonucleotide
gccaccgtgcctaatttttt

SEQ ID NO: 5551 - DNA, 20 bp, Artificial Sequence
  Description of Artificial Sequence: Synthetic oligonucleotide
ccaccgtgcctaattttttt

SEQ ID NO: 5552 - DNA, 20 bp, Artificial Sequence
  Description of Artificial Sequence: Synthetic oligonucleotide
caccgtgcctaatttttttt

SEQ ID NO: 5553 - DNA, 20 bp, Artificial Sequence
  Description of Artificial Sequence: Synthetic oligonucleotide
accgtgcctaattttttttt

SEQ ID NO: 5554 - DNA, 20 bp, Artificial Sequence
  Description of Artificial Sequence: Synthetic oligonucleotide
ccgtgcctaatttttttttt

SEQ ID NO: 5555 - DNA, 20 bp, Artificial Sequence
  Description of Artificial Sequence: Synthetic oligonucleotide
cgtgcctaattttttttttt

SEQ ID NO: 5556 - DNA, 20 bp, Artificial Sequence
  Description of Artificial Sequence: Synthetic oligonucleotide
gtgcctaatttttttttttt

SEQ ID NO: 5557 - DNA, 20 bp, Artificial Sequence
  Description of Artificial Sequence: Synthetic oligonucleotide
tgcctaattttttttttttt

SEQ ID NO: 5558 - DNA, 20 bp, Artificial Sequence
  Description of Artificial Sequence: Synthetic oligonucleotide
gcctaatttttttttttttt

SEQ ID NO: 5559 - DNA, 20 bp, Artificial Sequence
  Description of Artificial Sequence: Synthetic oligonucleotide
cctaattttttttttttttt

SEQ ID NO: 5560 - DNA, 20 bp, Artificial Sequence
  Description of Artificial Sequence: Synthetic oligonucleotide
ctaatttttttttttttttg

SEQ ID NO: 5561 - DNA, 20 bp, Artificial Sequence
  Description of Artificial Sequence: Synthetic oligonucleotide
taatttttttttttttttga

SEQ ID NO: 5562 - DNA, 20 bp, Artificial Sequence
  Description of Artificial Sequence: Synthetic oligonucleotide
aatttttttttttttttgag

SEQ ID NO: 5563 - DNA, 20 bp, Artificial Sequence
  Description of Artificial Sequence: Synthetic oligonucleotide
atttttttttttttttgaga

SEQ ID NO: 5564 - DNA, 20 bp, Artificial Sequence
  Description of Artificial Sequence: Synthetic oligonucleotide
tttttttttttttttgagaa

SEQ ID NO: 5565 - DNA, 20 bp, Artificial Sequence
  Description of Artificial Sequence: Synthetic oligonucleotide
ttttttttttttttgagaat

SEQ ID NO: 5566 - DNA, 20 bp, Artificial Sequence
  Description of Artificial Sequence: Synthetic oligonucleotide
tttttttttttttgagaatt

SEQ ID NO: 5567 - DNA, 20 bp, Artificial Sequence
  Description of Artificial Sequence: Synthetic oligonucleotide
ttttttttttttgagaattg

SEQ ID NO: 5568 - DNA, 20 bp, Artificial Sequence
  Description of Artificial Sequence: Synthetic oligonucleotide
tttttttttttgagaattgc

SEQ ID NO: 5569 - DNA, 20 bp, Artificial Sequence
  Description of Artificial Sequence: Synthetic oligonucleotide
ttttttttttgagaattgct

SEQ ID NO: 5570 - DNA, 20 bp, Artificial Sequence
  Description of Artificial Sequence: Synthetic oligonucleotide
tttttttttgagaattgctt

SEQ ID NO: 5571 - DNA, 20 bp, Artificial Sequence
  Description of Artificial Sequence: Synthetic oligonucleotide
ttttttttgagaattgcttg

SEQ ID NO: 5572 - DNA, 20 bp, Artificial Sequence
  Description of Artificial Sequence: Synthetic oligonucleotide
tttttttgagaattgcttga

SEQ ID NO: 5573 - DNA, 20 bp, Artificial Sequence
  Description of Artificial Sequence: Synthetic oligonucleotide
ttttttgagaattgcttgaa

SEQ ID NO: 5574 - DNA, 20 bp, Artificial Sequence
  Description of Artificial Sequence: Synthetic oligonucleotide
tttttgagaattgcttgaac

SEQ ID NO: 5575 - DNA, 20 bp, Artificial Sequence
  Description of Artificial Sequence: Synthetic oligonucleotide
ttttgagaattgcttgaacc

SEQ ID NO: 5576 - DNA, 20 bp, Artificial Sequence
  Description of Artificial Sequence: Synthetic oligonucleotide
tttgagaattgcttgaaccc

SEQ ID NO: 5577 - DNA, 20 bp, Artificial Sequence
  Description of Artificial Sequence: Synthetic oligonucleotide
ttgagaattgcttgaacccg

SEQ ID NO: 5578 - DNA, 20 bp, Artificial Sequence
  Description of Artificial Sequence: Synthetic oligonucleotide
tgagaattgcttgaacccgg

SEQ ID NO: 5579 - DNA, 20 bp, Artificial Sequence
  Description of Artificial Sequence: Synthetic oligonucleotide
gagaattgcttgaacccggg

SEQ ID NO: 5580 - DNA, 20 bp, Artificial Sequence
  Description of Artificial Sequence: Synthetic oligonucleotide
agaattgcttgaacccggga

SEQ ID NO: 5581 - DNA, 20 bp, Artificial Sequence
  Description of Artificial Sequence: Synthetic oligonucleotide
gaattgcttgaacccgggag

SEQ ID NO: 5582 - DNA, 20 bp, Artificial Sequence
  Description of Artificial Sequence: Synthetic oligonucleotide
aattgcttgaacccgggagg

SEQ ID NO: 5583 - DNA, 20 bp, Artificial Sequence
  Description of Artificial Sequence: Synthetic oligonucleotide
attgcttgaacccgggaggt

SEQ ID NO: 5584 - DNA, 20 bp, Artificial Sequence
  Description of Artificial Sequence: Synthetic oligonucleotide
ttgcttgaacccgggaggtg

SEQ ID NO: 5585 - DNA, 20 bp, Artificial Sequence
  Description of Artificial Sequence: Synthetic oligonucleotide
tgcttgaacccgggaggtgg

SEQ ID NO: 5586 - DNA, 20 bp, Artificial Sequence
  Description of Artificial Sequence: Synthetic oligonucleotide
gcttgaacccgggaggtgga

SEQ ID NO: 5587 - DNA, 20 bp, Artificial Sequence
  Description of Artificial Sequence: Synthetic oligonucleotide
cttgaacccgggaggtggag

SEQ ID NO: 5588 - DNA, 20 bp, Artificial Sequence
  Description of Artificial Sequence: Synthetic oligonucleotide
ttgaacccgggaggtggagg

SEQ ID NO: 5589 - DNA, 20 bp, Artificial Sequence
  Description of Artificial Sequence: Synthetic oligonucleotide
tgaacccgggaggtggaggt

SEQ ID NO: 5590 - DNA, 20 bp, Artificial Sequence
  Description of Artificial Sequence: Synthetic oligonucleotide
gaacccgggaggtggaggtt

SEQ ID NO: 5591 - DNA, 20 bp, Artificial Sequence
  Description of Artificial Sequence: Synthetic oligonucleotide
aacccgggaggtggaggttg

SEQ ID NO: 5592 - DNA, 20 bp, Artificial Sequence
  Description of Artificial Sequence: Synthetic oligonucleotide
acccgggaggtggaggttgc

SEQ ID NO: 5593 - DNA, 20 bp, Artificial Sequence
  Description of Artificial Sequence: Synthetic oligonucleotide
cccgggaggtggaggttgca

SEQ ID NO: 5594 - DNA, 20 bp, Artificial Sequence
  Description of Artificial Sequence: Synthetic oligonucleotide
ccgggaggtggaggttgcag

SEQ ID NO: 5595 - DNA, 20 bp, Artificial Sequence
  Description of Artificial Sequence: Synthetic oligonucleotide
cgggaggtggaggttgcagt

SEQ ID NO: 5596 - DNA, 20 bp, Artificial Sequence
  Description of Artificial Sequence: Synthetic oligonucleotide
gggaggtggaggttgcagtg

SEQ ID NO: 5597 - DNA, 20 bp, Artificial Sequence
  Description of Artificial Sequence: Synthetic oligonucleotide
ggaggtggaggttgcagtga

SEQ ID NO: 5598 - DNA, 20 bp, Artificial Sequence
  Description of Artificial Sequence: Synthetic oligonucleotide
gaggtggaggttgcagtgag

SEQ ID NO: 5599 - DNA, 20 bp, Artificial Sequence
  Description of Artificial Sequence: Synthetic oligonucleotide
aggtggaggttgcagtgagc

SEQ ID NO: 5600 - DNA, 20 bp, Artificial Sequence
  Description of Artificial Sequence: Synthetic oligonucleotide
ggtggaggttgcagtgagcc

SEQ ID NO: 5601 - DNA, 20 bp, Artificial Sequence
  Description of Artificial Sequence: Synthetic oligonucleotide
gtggaggttgcagtgagccg

SEQ ID NO: 5602 - DNA, 20 bp, Artificial Sequence
  Description of Artificial Sequence: Synthetic oligonucleotide
tggaggttgcagtgagccga

SEQ ID NO: 5603 - DNA, 20 bp, Artificial Sequence
  Description of Artificial Sequence: Synthetic oligonucleotide
ggaggttgcagtgagccgag

SEQ ID NO: 5604 - DNA, 20 bp, Artificial Sequence
  Description of Artificial Sequence: Synthetic oligonucleotide
gaggttgcagtgagccgaga

SEQ ID NO: 5605 - DNA, 20 bp, Artificial Sequence
  Description of Artificial Sequence: Synthetic oligonucleotide
aggttgcagtgagccgagat

SEQ ID NO: 5606 - DNA, 20 bp, Artificial Sequence
  Description of Artificial Sequence: Synthetic oligonucleotide
ggttgcagtgagccgagatc

SEQ ID NO: 5607 - DNA, 20 bp, Artificial Sequence
  Description of Artificial Sequence: Synthetic oligonucleotide
gttgcagtgagccgagatcg

SEQ ID NO: 5608 - DNA, 20 bp, Artificial Sequence
  Description of Artificial Sequence: Synthetic oligonucleotide
ttgcagtgagccgagatcgc

SEQ ID NO: 5609 - DNA, 20 bp, Artificial Sequence
  Description of Artificial Sequence: Synthetic oligonucleotide
tgcagtgagccgagatcgca

SEQ ID NO: 5610 - DNA, 20 bp, Artificial Sequence
  Description of Artificial Sequence: Synthetic oligonucleotide
gcagtgagccgagatcgcac

SEQ ID NO: 5611 - DNA, 20 bp, Artificial Sequence
  Description of Artificial Sequence: Synthetic oligonucleotide
cagtgagccgagatcgcacc

SEQ ID NO: 5612 - DNA, 20 bp, Artificial Sequence
  Description of Artificial Sequence: Synthetic oligonucleotide
agtgagccgagatcgcacca

SEQ ID NO: 5613 - DNA, 20 bp, Artificial Sequence
  Description of Artificial Sequence: Synthetic oligonucleotide
gtgagccgagatcgcaccac

SEQ ID NO: 5614 - DNA, 20 bp, Artificial Sequence
  Description of Artificial Sequence: Synthetic oligonucleotide
tgagccgagatcgcaccact

SEQ ID NO: 5615 - DNA, 20 bp, Artificial Sequence
  Description of Artificial Sequence: Synthetic oligonucleotide
gagccgagatcgcaccactg

SEQ ID NO: 5616 - DNA, 20 bp, Artificial Sequence
  Description of Artificial Sequence: Synthetic oligonucleotide
agccgagatcgcaccactgc

SEQ ID NO: 5617 - DNA, 20 bp, Artificial Sequence
  Description of Artificial Sequence: Synthetic oligonucleotide
gccgagatcgcaccactgca

SEQ ID NO: 5618 - DNA, 20 bp, Artificial Sequence
  Description of Artificial Sequence: Synthetic oligonucleotide
ccgagatcgcaccactgcac

SEQ ID NO: 5619 - DNA, 20 bp, Artificial Sequence
  Description of Artificial Sequence: Synthetic oligonucleotide
cgagatcgcaccactgcact

SEQ ID NO: 5620 - DNA, 20 bp, Artificial Sequence
  Description of Artificial Sequence: Synthetic oligonucleotide
gagatcgcaccactgcactc

SEQ ID NO: 5621 - DNA, 20 bp, Artificial Sequence
  Description of Artificial Sequence: Synthetic oligonucleotide
agatcgcaccactgcactcc

SEQ ID NO: 5622 - DNA, 20 bp, Artificial Sequence
  Description of Artificial Sequence: Synthetic oligonucleotide
gatcgcaccactgcactcca

SEQ ID NO: 5623 - DNA, 20 bp, Artificial Sequence
  Description of Artificial Sequence: Synthetic oligonucleotide
atcgcaccactgcactccag

SEQ ID NO: 5624 - DNA, 20 bp, Artificial Sequence
  Description of Artificial Sequence: Synthetic oligonucleotide
tcgcaccactgcactccagc

SEQ ID NO: 5625 - DNA, 20 bp, Artificial Sequence
  Description of Artificial Sequence: Synthetic oligonucleotide
cgcaccactgcactccagct

SEQ ID NO: 5626 - DNA, 20 bp, Artificial Sequence
  Description of Artificial Sequence: Synthetic oligonucleotide
gcaccactgcactccagctt

SEQ ID NO: 5627 - DNA, 20 bp, Artificial Sequence
  Description of Artificial Sequence: Synthetic oligonucleotide
caccactgcactccagctta

SEQ ID NO: 5628 - DNA, 20 bp, Artificial Sequence
  Description of Artificial Sequence: Synthetic oligonucleotide
accactgcactccagcttag

SEQ ID NO: 5629 - DNA, 20 bp, Artificial Sequence
  Description of Artificial Sequence: Synthetic oligonucleotide
ccactgcactccagcttagg

SEQ ID NO: 5630 - DNA, 20 bp, Artificial Sequence
  Description of Artificial Sequence: Synthetic oligonucleotide
cactgcactccagcttaggc

SEQ ID NO: 5631 - DNA, 20 bp, Artificial Sequence
  Description of Artificial Sequence: Synthetic oligonucleotide
actgcactccagcttaggca

SEQ ID NO: 5632 - DNA, 20 bp, Artificial Sequence
  Description of Artificial Sequence: Synthetic oligonucleotide
ctgcactccagcttaggcaa

SEQ ID NO: 5633 - DNA, 20 bp, Artificial Sequence
  Description of Artificial Sequence: Synthetic oligonucleotide
tgcactccagcttaggcaac

SEQ ID NO: 5634 - DNA, 20 bp, Artificial Sequence
  Description of Artificial Sequence: Synthetic oligonucleotide
gcactccagcttaggcaaca

SEQ ID NO: 5635 - DNA, 20 bp, Artificial Sequence
  Description of Artificial Sequence: Synthetic oligonucleotide
cactccagcttaggcaacag

SEQ ID NO: 5636 - DNA, 20 bp, Artificial Sequence
  Description of Artificial Sequence: Synthetic oligonucleotide
actccagcttaggcaacaga

SEQ ID NO: 5637 - DNA, 20 bp, Artificial Sequence
  Description of Artificial Sequence: Synthetic oligonucleotide
ctccagcttaggcaacagag

SEQ ID NO: 5638 - DNA, 20 bp, Artificial Sequence
  Description of Artificial Sequence: Synthetic oligonucleotide
tccagcttaggcaacagagt

SEQ ID NO: 5639 - DNA, 20 bp, Artificial Sequence
  Description of Artificial Sequence: Synthetic oligonucleotide
ccagcttaggcaacagagtg

SEQ ID NO: 5640 - DNA, 20 bp, Artificial Sequence
  Description of Artificial Sequence: Synthetic oligonucleotide
cagcttaggcaacagagtga

SEQ ID NO: 5641 - DNA, 20 bp, Artificial Sequence
  Description of Artificial Sequence: Synthetic oligonucleotide
agcttaggcaacagagtgag

SEQ ID NO: 5642 - DNA, 20 bp, Artificial Sequence
  Description of Artificial Sequence: Synthetic oligonucleotide
gcttaggcaacagagtgaga

SEQ ID NO: 5643 - DNA, 20 bp, Artificial Sequence
  Description of Artificial Sequence: Synthetic oligonucleotide
cttaggcaacagagtgagac

SEQ ID NO: 5644 - DNA, 20 bp, Artificial Sequence
  Description of Artificial Sequence: Synthetic oligonucleotide
ttaggcaacagagtgagacc

SEQ ID NO: 5645 - DNA, 20 bp, Artificial Sequence
  Description of Artificial Sequence: Synthetic oligonucleotide
taggcaacagagtgagaccc

SEQ ID NO: 5646 - DNA, 20 bp, Artificial Sequence
  Description of Artificial Sequence: Synthetic oligonucleotide
aggcaacagagtgagaccct

SEQ ID NO: 5647 - DNA, 20 bp, Artificial Sequence
  Description of Artificial Sequence: Synthetic oligonucleotide
ggcaacagagtgagaccctg

SEQ ID NO: 5648 - DNA, 20 bp, Artificial Sequence
  Description of Artificial Sequence: Synthetic oligonucleotide
gcaacagagtgagaccctgt

SEQ ID NO: 5649 - DNA, 20 bp, Artificial Sequence
  Description of Artificial Sequence: Synthetic oligonucleotide
caacagagtgagaccctgtt

SEQ ID NO: 5650 - DNA, 20 bp, Artificial Sequence
  Description of Artificial Sequence: Synthetic oligonucleotide
aacagagtgagaccctgttt

SEQ ID NO: 5651 - DNA, 20 bp, Artificial Sequence
  Description of Artificial Sequence: Synthetic oligonucleotide
acagagtgagaccctgtttc

SEQ ID NO: 5652 - DNA, 20 bp, Artificial Sequence
  Description of Artificial Sequence: Synthetic oligonucleotide
cagagtgagaccctgtttca

SEQ ID NO: 5653 - DNA, 20 bp, Artificial Sequence
  Description of Artificial Sequence: Synthetic oligonucleotide
agagtgagaccctgtttcaa

SEQ ID NO: 5654 - DNA, 20 bp, Artificial Sequence
  Description of Artificial Sequence: Synthetic oligonucleotide
gagtgagaccctgtttcaaa

SEQ ID NO: 5655 - DNA, 20 bp, Artificial Sequence
  Description of Artificial Sequence: Synthetic oligonucleotide
agtgagaccctgtttcaaaa

SEQ ID NO: 5656 - DNA, 20 bp, Artificial Sequence
  Description of Artificial Sequence: Synthetic oligonucleotide
gtgagaccctgtttcaaaaa

SEQ ID NO: 5657 - DNA, 20 bp, Artificial Sequence
  Description of Artificial Sequence: Synthetic oligonucleotide
tgagaccctgtttcaaaaaa

SEQ ID NO: 5658 - DNA, 20 bp, Artificial Sequence
  Description of Artificial Sequence: Synthetic oligonucleotide
gagaccctgtttcaaaaaaa

SEQ ID NO: 5659 - DNA, 20 bp, Artificial Sequence
  Description of Artificial Sequence: Synthetic oligonucleotide
agaccctgtttcaaaaaaaa

SEQ ID NO: 5660 - DNA, 20 bp, Artificial Sequence
  Description of Artificial Sequence: Synthetic oligonucleotide
gaccctgtttcaaaaaaaaa

SEQ ID NO: 5661 - DNA, 20 bp, Artificial Sequence
  Description of Artificial Sequence: Synthetic oligonucleotide
accctgtttcaaaaaaaaaa

SEQ ID NO: 5662 - DNA, 20 bp, Artificial Sequence
  Description of Artificial Sequence: Synthetic oligonucleotide
ccctgtttcaaaaaaaaaaa

SEQ ID NO: 5663 - DNA, 20 bp, Artificial Sequence
  Description of Artificial Sequence: Synthetic oligonucleotide
cctgtttcaaaaaaaaaaaa

SEQ ID NO: 5664 - DNA, 20 bp, Artificial Sequence
  Description of Artificial Sequence: Synthetic oligonucleotide
ctgtttcaaaaaaaaaaaaa

SEQ ID NO: 5665 - DNA, 20 bp, Artificial Sequence
  Description of Artificial Sequence: Synthetic oligonucleotide
tgtttcaaaaaaaaaaaaaa

SEQ ID NO: 5666 - DNA, 20 bp, Artificial Sequence
  Description of Artificial Sequence: Synthetic oligonucleotide
gtttcaaaaaaaaaaaaaaa

SEQ ID NO: 5667 - DNA, 20 bp, Artificial Sequence
  Description of Artificial Sequence: Synthetic oligonucleotide
tttcaaaaaaaaaaaaaaaa

SEQ ID NO: 5668 - DNA, 20 bp, Artificial Sequence
  Description of Artificial Sequence: Synthetic oligonucleotide
ttcaaaaaaaaaaaaaaaaa

SEQ ID NO: 5669 - DNA, 20 bp, Artificial Sequence
  Description of Artificial Sequence: Synthetic oligonucleotide
tcaaaaaaaaaaaaaaaaaa

SEQ ID NO: 5670 - DNA, 20 bp, Artificial Sequence
  Description of Artificial Sequence: Synthetic oligonucleotide
caaaaaaaaaaaaaaaaaaa

SEQ ID NO: 5671 - DNA, 20 bp, Artificial Sequence
  Description of Artificial Sequence: Synthetic oligonucleotide
aaaaaaaaaaaaaaaaaaag

SEQ ID NO: 5672 - DNA, 20 bp, Artificial Sequence
  Description of Artificial Sequence: Synthetic oligonucleotide
aaaaaaaaaaaaaaaaaaga

SEQ ID NO: 5673 - DNA, 20 bp, Artificial Sequence
  Description of Artificial Sequence: Synthetic oligonucleotide
aaaaaaaaaaaaaaaaagaa

SEQ ID NO: 5674 - DNA, 20 bp, Artificial Sequence
  Description of Artificial Sequence: Synthetic oligonucleotide
aaaaaaaaaaaaaaaagaat

SEQ ID NO: 5675 - DNA, 20 bp, Artificial Sequence
  Description of Artificial Sequence: Synthetic oligonucleotide
aaaaaaaaaaaaaaagaatc

SEQ ID NO: 5676 - DNA, 20 bp, Artificial Sequence
  Description of Artificial Sequence: Synthetic oligonucleotide
aaaaaaaaaaaaaagaatcc

SEQ ID NO: 5677 - DNA, 20 bp, Artificial Sequence
  Description of Artificial Sequence: Synthetic oligonucleotide
aaaaaaaaaaaaagaatcct

SEQ ID NO: 5678 - DNA, 20 bp, Artificial Sequence
  Description of Artificial Sequence: Synthetic oligonucleotide
aaaaaaaaaaaagaatcctg

SEQ ID NO: 5679 - DNA, 20 bp, Artificial Sequence
  Description of Artificial Sequence: Synthetic oligonucleotide
aaaaaaaaaaagaatcctgt

SEQ ID NO: 5680 - DNA, 20 bp, Artificial Sequence
  Description of Artificial Sequence: Synthetic oligonucleotide
aaaaaaaaaagaatcctgtg

SEQ ID NO: 5681 - DNA, 20 bp, Artificial Sequence
  Description of Artificial Sequence: Synthetic oligonucleotide
aaaaaaaaagaatcctgtgg

SEQ ID NO: 5682 - DNA, 20 bp, Artificial Sequence
  Description of Artificial Sequence: Synthetic oligonucleotide
aaaaaaaagaatcctgtgga

SEQ ID NO: 5683 - DNA, 20 bp, Artificial Sequence
  Description of Artificial Sequence: Synthetic oligonucleotide
aaaaaaagaatcctgtggag

SEQ ID NO: 5684 - DNA, 20 bp, Artificial Sequence
  Description of Artificial Sequence: Synthetic oligonucleotide
aaaaaagaatcctgtggagc

SEQ ID NO: 5685 - DNA, 20 bp, Artificial Sequence
  Description of Artificial Sequence: Synthetic oligonucleotide
aaaaagaatcctgtggagca

SEQ ID NO: 5686 - DNA, 20 bp, Artificial Sequence
  Description of Artificial Sequence: Synthetic oligonucleotide
aaaagaatcctgtggagcac

SEQ ID NO: 5687 - DNA, 20 bp, Artificial Sequence
  Description of Artificial Sequence: Synthetic oligonucleotide
aaagaatcctgtggagcacc

SEQ ID NO: 5688 - DNA, 20 bp, Artificial Sequence
  Description of Artificial Sequence: Synthetic oligonucleotide
aagaatcctgtggagcacca

SEQ ID NO: 5689 - DNA, 20 bp, Artificial Sequence
  Description of Artificial Sequence: Synthetic oligonucleotide
agaatcctgtggagcaccat

SEQ ID NO: 5690 - DNA, 20 bp, Artificial Sequence
  Description of Artificial Sequence: Synthetic oligonucleotide
gaatcctgtggagcaccatt

SEQ ID NO: 5691 - DNA, 20 bp, Artificial Sequence
  Description of Artificial Sequence: Synthetic oligonucleotide
aatcctgtggagcaccatta

SEQ ID NO: 5692 - DNA, 20 bp, Artificial Sequence
  Description of Artificial Sequence: Synthetic oligonucleotide
atcctgtggagcaccattat

SEQ ID NO: 5693 - DNA, 20 bp, Artificial Sequence
  Description of Artificial Sequence: Synthetic oligonucleotide
tcctgtggagcaccattata

SEQ ID NO: 5694 - DNA, 20 bp, Artificial Sequence
  Description of Artificial Sequence: Synthetic oligonucleotide
cctgtggagcaccattataa

SEQ ID NO: 5695 - DNA, 20 bp, Artificial Sequence
  Description of Artificial Sequence: Synthetic oligonucleotide
ctgtggagcaccattataaa

SEQ ID NO: 5696 - DNA, 20 bp, Artificial Sequence
  Description of Artificial Sequence: Synthetic oligonucleotide
tgtggagcaccattataaag

SEQ ID NO: 5697 - DNA, 20 bp, Artificial Sequence
  Description of Artificial Sequence: Synthetic oligonucleotide
gtggagcaccattataaaga

SEQ ID NO: 5698 - DNA, 20 bp, Artificial Sequence
  Description of Artificial Sequence: Synthetic oligonucleotide
tggagcaccattataaagat

SEQ ID NO: 5699 - DNA, 20 bp, Artificial Sequence
  Description of Artificial Sequence: Synthetic oligonucleotide
ggagcaccattataaagatg

SEQ ID NO: 5700 - DNA, 20 bp, Artificial Sequence
  Description of Artificial Sequence: Synthetic oligonucleotide
gagcaccattataaagatgt

SEQ ID NO: 5701 - DNA, 20 bp, Artificial Sequence
  Description of Artificial Sequence: Synthetic oligonucleotide
agcaccattataaagatgtt

SEQ ID NO: 5702 - DNA, 20 bp, Artificial Sequence
  Description of Artificial Sequence: Synthetic oligonucleotide
gcaccattataaagatgttt

SEQ ID NO: 5703 - DNA, 20 bp, Artificial Sequence
  Description of Artificial Sequence: Synthetic oligonucleotide
caccattataaagatgtttg

SEQ ID NO: 5704 - DNA, 20 bp, Artificial Sequence
  Description of Artificial Sequence: Synthetic oligonucleotide
accattataaagatgtttgt

SEQ ID NO: 5705 - DNA, 20 bp, Artificial Sequence
  Description of Artificial Sequence: Synthetic oligonucleotide
ccattataaagatgtttgtg

SEQ ID NO: 5706 - DNA, 20 bp, Artificial Sequence
  Description of Artificial Sequence: Synthetic oligonucleotide
cattataaagatgtttgtgg

SEQ ID NO: 5707 - DNA, 20 bp, Artificial Sequence
  Description of Artificial Sequence: Synthetic oligonucleotide
attataaagatgtttgtggc

SEQ ID NO: 5708 - DNA, 20 bp, Artificial Sequence
  Description of Artificial Sequence: Synthetic oligonucleotide
ttataaagatgtttgtggcc

SEQ ID NO: 5709 - DNA, 20 bp, Artificial Sequence
  Description of Artificial Sequence: Synthetic oligonucleotide
tataaagatgtttgtggccg

SEQ ID NO: 5710 - DNA, 20 bp, Artificial Sequence
  Description of Artificial Sequence: Synthetic oligonucleotide
ataaagatgtttgtggccgg

SEQ ID NO: 5711 - DNA, 20 bp, Artificial Sequence
  Description of Artificial Sequence: Synthetic oligonucleotide
taaagatgtttgtggccggg

SEQ ID NO: 5712 - DNA, 20 bp, Artificial Sequence
  Description of Artificial Sequence: Synthetic oligonucleotide
aaagatgtttgtggccgggt

SEQ ID NO: 5713 - DNA, 20 bp, Artificial Sequence
  Description of Artificial Sequence: Synthetic oligonucleotide
aagatgtttgtggccgggta

SEQ ID NO: 5714 - DNA, 20 bp, Artificial Sequence
  Description of Artificial Sequence: Synthetic oligonucleotide
agatgtttgtggccgggtat

SEQ ID NO: 5715 - DNA, 20 bp, Artificial Sequence
  Description of Artificial Sequence: Synthetic oligonucleotide
gatgtttgtggccgggtatt

SEQ ID NO: 5716 - DNA, 20 bp, Artificial Sequence
  Description of Artificial Sequence: Synthetic oligonucleotide
atgtttgtggccgggtattg

SEQ ID NO: 5717 - DNA, 20 bp, Artificial Sequence
  Description of Artificial Sequence: Synthetic oligonucleotide
tgtttgtggccgggtattgt

SEQ ID NO: 5718 - DNA, 20 bp, Artificial Sequence
  Description of Artificial Sequence: Synthetic oligonucleotide
gtttgtggccgggtattgtg

SEQ ID NO: 5719 - DNA, 20 bp, Artificial Sequence
  Description of Artificial Sequence: Synthetic oligonucleotide
tttgtggccgggtattgtgg

SEQ ID NO: 5720 - DNA, 20 bp, Artificial Sequence
  Description of Artificial Sequence: Synthetic oligonucleotide
ttgtggccgggtattgtggc

SEQ ID NO: 5721 - DNA, 20 bp, Artificial Sequence
  Description of Artificial Sequence: Synthetic oligonucleotide
tgtggccgggtattgtggct

SEQ ID NO: 5722 - DNA, 20 bp, Artificial Sequence
  Description of Artificial Sequence: Synthetic oligonucleotide
gtggccgggtattgtggctc

SEQ ID NO: 5723 - DNA, 20 bp, Artificial Sequence
  Description of Artificial Sequence: Synthetic oligonucleotide
tggccgggtattgtggctca

SEQ ID NO: 5724 - DNA, 20 bp, Artificial Sequence
  Description of Artificial Sequence: Synthetic oligonucleotide
ggccgggtattgtggctcac

SEQ ID NO: 5725 - DNA, 20 bp, Artificial Sequence
  Description of Artificial Sequence: Synthetic oligonucleotide
gccgggtattgtggctcacg

SEQ ID NO: 5726 - DNA, 20 bp, Artificial Sequence
  Description of Artificial Sequence: Synthetic oligonucleotide
ccgggtattgtggctcacgc

SEQ ID NO: 5727 - DNA, 20 bp, Artificial Sequence
  Description of Artificial Sequence: Synthetic oligonucleotide
cgggtattgtggctcacgcc

SEQ ID NO: 5728 - DNA, 20 bp, Artificial Sequence
  Description of Artificial Sequence: Synthetic oligonucleotide
gggtattgtggctcacgcct

SEQ ID NO: 5729 - DNA, 20 bp, Artificial Sequence
  Description of Artificial Sequence: Synthetic oligonucleotide
ggtattgtggctcacgcctg

SEQ ID NO: 5730 - DNA, 20 bp, Artificial Sequence
  Description of Artificial Sequence: Synthetic oligonucleotide
gtattgtggctcacgcctgt

SEQ ID NO: 5731 - DNA, 20 bp, Artificial Sequence
  Description of Artificial Sequence: Synthetic oligonucleotide
tattgtggctcacgcctgta

SEQ ID NO: 5732 - DNA, 20 bp, Artificial Sequence
  Description of Artificial Sequence: Synthetic oligonucleotide
attgtggctcacgcctgtaa

SEQ ID NO: 5733 - DNA, 20 bp, Artificial Sequence
  Description of Artificial Sequence: Synthetic oligonucleotide
ttgtggctcacgcctgtaat

SEQ ID NO: 5734 - DNA, 20 bp, Artificial Sequence
  Description of Artificial Sequence: Synthetic oligonucleotide
tgtggctcacgcctgtaatc

SEQ ID NO: 5735 - DNA, 20 bp, Artificial Sequence
  Description of Artificial Sequence: Synthetic oligonucleotide
gtggctcacgcctgtaatcc

SEQ ID NO: 5736 - DNA, 20 bp, Artificial Sequence
  Description of Artificial Sequence: Synthetic oligonucleotide
tggctcacgcctgtaatccc

SEQ ID NO: 5737 - DNA, 20 bp, Artificial Sequence
  Description of Artificial Sequence: Synthetic oligonucleotide
ggctcacgcctgtaatccca

SEQ ID NO: 5738 - DNA, 20 bp, Artificial Sequence
  Description of Artificial Sequence: Synthetic oligonucleotide
gctcacgcctgtaatcccaa

SEQ ID NO: 5739 - DNA, 20 bp, Artificial Sequence
  Description of Artificial Sequence: Synthetic oligonucleotide
ctcacgcctgtaatcccaac

SEQ ID NO: 5740 - DNA, 20 bp, Artificial Sequence
  Description of Artificial Sequence: Synthetic oligonucleotide
tcacgcctgtaatcccaaca

SEQ ID NO: 5741 - DNA, 20 bp, Artificial Sequence
  Description of Artificial Sequence: Synthetic oligonucleotide
cacgcctgtaatcccaacac

SEQ ID NO: 5742 - DNA, 20 bp, Artificial Sequence
  Description of Artificial Sequence: Synthetic oligonucleotide
acgcctgtaatcccaacact

SEQ ID NO: 5743 - DNA, 20 bp, Artificial Sequence
  Description of Artificial Sequence: Synthetic oligonucleotide
cgcctgtaatcccaacactt

SEQ ID NO: 5744 - DNA, 20 bp, Artificial Sequence
  Description of Artificial Sequence: Synthetic oligonucleotide
gcctgtaatcccaacacttt

SEQ ID NO: 5745 - DNA, 20 bp, Artificial Sequence
  Description of Artificial Sequence: Synthetic oligonucleotide
cctgtaatcccaacactttg

SEQ ID NO: 5746 - DNA, 20 bp, Artificial Sequence
  Description of Artificial Sequence: Synthetic oligonucleotide
ctgtaatcccaacactttgg

SEQ ID NO: 5747 - DNA, 20 bp, Artificial Sequence
  Description of Artificial Sequence: Synthetic oligonucleotide
tgtaatcccaacactttggg

SEQ ID NO: 5748 - DNA, 20 bp, Artificial Sequence
  Description of Artificial Sequence: Synthetic oligonucleotide
gtaatcccaacactttggga

SEQ ID NO: 5749 - DNA, 20 bp, Artificial Sequence
  Description of Artificial Sequence: Synthetic oligonucleotide
taatcccaacactttgggag

SEQ ID NO: 5750 - DNA, 20 bp, Artificial Sequence
  Description of Artificial Sequence: Synthetic oligonucleotide
aatcccaacactttgggagg

SEQ ID NO: 5751 - DNA, 20 bp, Artificial Sequence
  Description of Artificial Sequence: Synthetic oligonucleotide
atcccaacactttgggaggc

SEQ ID NO: 5752 - DNA, 20 bp, Artificial Sequence
  Description of Artificial Sequence: Synthetic oligonucleotide
tcccaacactttgggaggcc

SEQ ID NO: 5753 - DNA, 20 bp, Artificial Sequence
  Description of Artificial Sequence: Synthetic oligonucleotide
cccaacactttgggaggccg

SEQ ID NO: 5754 - DNA, 20 bp, Artificial Sequence
  Description of Artificial Sequence: Synthetic oligonucleotide
ccaacactttgggaggccga

SEQ ID NO: 5755 - DNA, 20 bp, Artificial Sequence
  Description of Artificial Sequence: Synthetic oligonucleotide
caacactttgggaggccgag

SEQ ID NO: 5756 - DNA, 20 bp, Artificial Sequence
  Description of Artificial Sequence: Synthetic oligonucleotide
aacactttgggaggccgagg

SEQ ID NO: 5757 - DNA, 20 bp, Artificial Sequence
  Description of Artificial Sequence: Synthetic oligonucleotide
acactttgggaggccgaggt

SEQ ID NO: 5758 - DNA, 20 bp, Artificial Sequence
  Description of Artificial Sequence: Synthetic oligonucleotide
cactttgggaggccgaggtg

SEQ ID NO: 5759 - DNA, 20 bp, Artificial Sequence
  Description of Artificial Sequence: Synthetic oligonucleotide
actttgggaggccgaggtgg

SEQ ID NO: 5760 - DNA, 20 bp, Artificial Sequence
  Description of Artificial Sequence: Synthetic oligonucleotide
ctttgggaggccgaggtggg

SEQ ID NO: 5761 - DNA, 20 bp, Artificial Sequence
  Description of Artificial Sequence: Synthetic oligonucleotide
tttgggaggccgaggtgggc

SEQ ID NO: 5762 - DNA, 20 bp, Artificial Sequence
  Description of Artificial Sequence: Synthetic oligonucleotide
ttgggaggccgaggtgggca

SEQ ID NO: 5763 - DNA, 20 bp, Artificial Sequence
  Description of Artificial Sequence: Synthetic oligonucleotide
tgggaggccgaggtgggcag

SEQ ID NO: 5764 - DNA, 20 bp, Artificial Sequence
  Description of Artificial Sequence: Synthetic oligonucleotide
gggaggccgaggtgggcaga

SEQ ID NO: 5765 - DNA, 20 bp, Artificial Sequence
  Description of Artificial Sequence: Synthetic oligonucleotide
ggaggccgaggtgggcagat

SEQ ID NO: 5766 - DNA, 20 bp, Artificial Sequence
  Description of Artificial Sequence: Synthetic oligonucleotide
gaggccgaggtgggcagatc

SEQ ID NO: 5767 - DNA, 20 bp, Artificial Sequence
  Description of Artificial Sequence: Synthetic oligonucleotide
aggccgaggtgggcagatca

SEQ ID NO: 5768 - DNA, 20 bp, Artificial Sequence
  Description of Artificial Sequence: Synthetic oligonucleotide
ggccgaggtgggcagatcac

SEQ ID NO: 5769 - DNA, 20 bp, Artificial Sequence
  Description of Artificial Sequence: Synthetic oligonucleotide
gccgaggtgggcagatcact

SEQ ID NO: 5770 - DNA, 20 bp, Artificial Sequence
  Description of Artificial Sequence: Synthetic oligonucleotide
ccgaggtgggcagatcactt

SEQ ID NO: 5771 - DNA, 20 bp, Artificial Sequence
  Description of Artificial Sequence: Synthetic oligonucleotide
cgaggtgggcagatcacttg

SEQ ID NO: 5772 - DNA, 20 bp, Artificial Sequence
  Description of Artificial Sequence: Synthetic oligonucleotide
gaggtgggcagatcacttga

SEQ ID NO: 5773 - DNA, 20 bp, Artificial Sequence
  Description of Artificial Sequence: Synthetic oligonucleotide
aggtgggcagatcacttgag

SEQ ID NO: 5774 - DNA, 20 bp, Artificial Sequence
  Description of Artificial Sequence: Synthetic oligonucleotide
ggtgggcagatcacttgagg

SEQ ID NO: 5775 - DNA, 20 bp, Artificial Sequence
  Description of Artificial Sequence: Synthetic oligonucleotide
gtgggcagatcacttgaggt

SEQ ID NO: 5776 - DNA, 20 bp, Artificial Sequence
  Description of Artificial Sequence: Synthetic oligonucleotide
tgggcagatcacttgaggtc

SEQ ID NO: 5777 - DNA, 20 bp, Artificial Sequence
  Description of Artificial Sequence: Synthetic oligonucleotide
gggcagatcacttgaggtca

SEQ ID NO: 5778 - DNA, 20 bp, Artificial Sequence
  Description of Artificial Sequence: Synthetic oligonucleotide
ggcagatcacttgaggtcag

SEQ ID NO: 5779 - DNA, 20 bp, Artificial Sequence
  Description of Artificial Sequence: Synthetic oligonucleotide
gcagatcacttgaggtcagg

SEQ ID NO: 5780 - DNA, 20 bp, Artificial Sequence
  Description of Artificial Sequence: Synthetic oligonucleotide
cagatcacttgaggtcagga

SEQ ID NO: 5781 - DNA, 20 bp, Artificial Sequence
  Description of Artificial Sequence: Synthetic oligonucleotide
agatcacttgaggtcaggag

SEQ ID NO: 5782 - DNA, 20 bp, Artificial Sequence
  Description of Artificial Sequence: Synthetic oligonucleotide
gatcacttgaggtcaggagt

SEQ ID NO: 5783 - DNA, 20 bp, Artificial Sequence
  Description of Artificial Sequence: Synthetic oligonucleotide
atcacttgaggtcaggagtt

SEQ ID NO: 5784 - DNA, 20 bp, Artificial Sequence
  Description of Artificial Sequence: Synthetic oligonucleotide
tcacttgaggtcaggagttc

SEQ ID NO: 5785 - DNA, 20 bp, Artificial Sequence
  Description of Artificial Sequence: Synthetic oligonucleotide
cacttgaggtcaggagttca

SEQ ID NO: 5786 - DNA, 20 bp, Artificial Sequence
  Description of Artificial Sequence: Synthetic oligonucleotide
acttgaggtcaggagttcaa

SEQ ID NO: 5787 - DNA, 20 bp, Artificial Sequence
  Description of Artificial Sequence: Synthetic oligonucleotide
cttgaggtcaggagttcaag

SEQ ID NO: 5788 - DNA, 20 bp, Artificial Sequence
  Description of Artificial Sequence: Synthetic oligonucleotide
ttgaggtcaggagttcaaga

SEQ ID NO: 5789 - DNA, 20 bp, Artificial Sequence
  Description of Artificial Sequence: Synthetic oligonucleotide
tgaggtcaggagttcaagac

SEQ ID NO: 5790 - DNA, 20 bp, Artificial Sequence
  Description of Artificial Sequence: Synthetic oligonucleotide
gaggtcaggagttcaagacc

SEQ ID NO: 5791 - DNA, 20 bp, Artificial Sequence
  Description of Artificial Sequence: Synthetic oligonucleotide
aggtcaggagttcaagacca

SEQ ID NO: 5792 - DNA, 20 bp, Artificial Sequence
  Description of Artificial Sequence: Synthetic oligonucleotide
ggtcaggagttcaagaccac

SEQ ID NO: 5793 - DNA, 20 bp, Artificial Sequence
  Description of Artificial Sequence: Synthetic oligonucleotide
gtcaggagttcaagaccacc

SEQ ID NO: 5794 - DNA, 20 bp, Artificial Sequence
  Description of Artificial Sequence: Synthetic oligonucleotide
tcaggagttcaagaccaccc

SEQ ID NO: 5795 - DNA, 20 bp, Artificial Sequence
  Description of Artificial Sequence: Synthetic oligonucleotide
caggagttcaagaccaccct

SEQ ID NO: 5796 - DNA, 20 bp, Artificial Sequence
  Description of Artificial Sequence: Synthetic oligonucleotide
aggagttcaagaccaccctg

SEQ ID NO: 5797 - DNA, 20 bp, Artificial Sequence
  Description of Artificial Sequence: Synthetic oligonucleotide
ggagttcaagaccaccctgg

SEQ ID NO: 5798 - DNA, 20 bp, Artificial Sequence
  Description of Artificial Sequence: Synthetic oligonucleotide
gagttcaagaccaccctggc

SEQ ID NO: 5799 - DNA, 20 bp, Artificial Sequence
  Description of Artificial Sequence: Synthetic oligonucleotide
agttcaagaccaccctggcc

SEQ ID NO: 5800 - DNA, 20 bp, Artificial Sequence
  Description of Artificial Sequence: Synthetic oligonucleotide
gttcaagaccaccctggcca

SEQ ID NO: 5801 - DNA, 20 bp, Artificial Sequence
  Description of Artificial Sequence: Synthetic oligonucleotide
ttcaagaccaccctggccaa

SEQ ID NO: 5802 - DNA, 20 bp, Artificial Sequence
  Description of Artificial Sequence: Synthetic oligonucleotide
tcaagaccaccctggccaac

SEQ ID NO: 5803 - DNA, 20 bp, Artificial Sequence
  Description of Artificial Sequence: Synthetic oligonucleotide
caagaccaccctggccaaca

SEQ ID NO: 5804 - DNA, 20 bp, Artificial Sequence
  Description of Artificial Sequence: Synthetic oligonucleotide
aagaccaccctggccaacat

SEQ ID NO: 5805 - DNA, 20 bp, Artificial Sequence
  Description of Artificial Sequence: Synthetic oligonucleotide
agaccaccctggccaacatg

SEQ ID NO: 5806 - DNA, 20 bp, Artificial Sequence
  Description of Artificial Sequence: Synthetic oligonucleotide
gaccaccctggccaacatgg

SEQ ID NO: 5807 - DNA, 20 bp, Artificial Sequence
  Description of Artificial Sequence: Synthetic oligonucleotide
accaccctggccaacatggt

SEQ ID NO: 5808 - DNA, 20 bp, Artificial Sequence
  Description of Artificial Sequence: Synthetic oligonucleotide
ccaccctggccaacatggtg

SEQ ID NO: 5809 - DNA, 20 bp, Artificial Sequence
  Description of Artificial Sequence: Synthetic oligonucleotide
caccctggccaacatggtga

SEQ ID NO: 5810 - DNA, 20 bp, Artificial Sequence
  Description of Artificial Sequence: Synthetic oligonucleotide
accctggccaacatggtgaa

SEQ ID NO: 5811 - DNA, 20 bp, Artificial Sequence
  Description of Artificial Sequence: Synthetic oligonucleotide
ccctggccaacatggtgaaa

SEQ ID NO: 5812 - DNA, 20 bp, Artificial Sequence
  Description of Artificial Sequence: Synthetic oligonucleotide
cctggccaacatggtgaaac

SEQ ID NO: 5813 - DNA, 20 bp, Artificial Sequence
  Description of Artificial Sequence: Synthetic oligonucleotide
ctggccaacatggtgaaacc

SEQ ID NO: 5814 - DNA, 20 bp, Artificial Sequence
  Description of Artificial Sequence: Synthetic oligonucleotide
tggccaacatggtgaaaccc

SEQ ID NO: 5815 - DNA, 20 bp, Artificial Sequence
  Description of Artificial Sequence: Synthetic oligonucleotide
ggccaacatggtgaaacccc

SEQ ID NO: 5816 - DNA, 20 bp, Artificial Sequence
  Description of Artificial Sequence: Synthetic oligonucleotide
gccaacatggtgaaaccccg

SEQ ID NO: 5817 - DNA, 20 bp, Artificial Sequence
  Description of Artificial Sequence: Synthetic oligonucleotide
ccaacatggtgaaaccccgt

SEQ ID NO: 5818 - DNA, 20 bp, Artificial Sequence
  Description of Artificial Sequence: Synthetic oligonucleotide
caacatggtgaaaccccgtc

SEQ ID NO: 5819 - DNA, 20 bp, Artificial Sequence
  Description of Artificial Sequence: Synthetic oligonucleotide
aacatggtgaaaccccgtct

SEQ ID NO: 5820 - DNA, 20 bp, Artificial Sequence
  Description of Artificial Sequence: Synthetic oligonucleotide
acatggtgaaaccccgtctc

SEQ ID NO: 5821 - DNA, 20 bp, Artificial Sequence
  Description of Artificial Sequence: Synthetic oligonucleotide
catggtgaaaccccgtctct

SEQ ID NO: 5822 - DNA, 20 bp, Artificial Sequence
  Description of Artificial Sequence: Synthetic oligonucleotide
atggtgaaaccccgtctcta

SEQ ID NO: 5823 - DNA, 20 bp, Artificial Sequence
  Description of Artificial Sequence: Synthetic oligonucleotide
tggtgaaaccccgtctctac

SEQ ID NO: 5824 - DNA, 20 bp, Artificial Sequence
  Description of Artificial Sequence: Synthetic oligonucleotide
ggtgaaaccccgtctctact

SEQ ID NO: 5825 - DNA, 20 bp, Artificial Sequence
  Description of Artificial Sequence: Synthetic oligonucleotide
gtgaaaccccgtctctacta

SEQ ID NO: 5826 - DNA, 20 bp, Artificial Sequence
  Description of Artificial Sequence: Synthetic oligonucleotide
tgaaaccccgtctctactaa

SEQ ID NO: 5827 - DNA, 20 bp, Artificial Sequence
  Description of Artificial Sequence: Synthetic oligonucleotide
gaaaccccgtctctactaaa

SEQ ID NO: 5828 - DNA, 20 bp, Artificial Sequence
  Description of Artificial Sequence: Synthetic oligonucleotide
aaaccccgtctctactaaaa

SEQ ID NO: 5829 - DNA, 20 bp, Artificial Sequence
  Description of Artificial Sequence: Synthetic oligonucleotide
aaccccgtctctactaaaaa

SEQ ID NO: 5830 - DNA, 20 bp, Artificial Sequence
  Description of Artificial Sequence: Synthetic oligonucleotide
accccgtctctactaaaaat

SEQ ID NO: 5831 - DNA, 20 bp, Artificial Sequence
  Description of Artificial Sequence: Synthetic oligonucleotide
ccccgtctctactaaaaata

SEQ ID NO: 5832 - DNA, 20 bp, Artificial Sequence
  Description of Artificial Sequence: Synthetic oligonucleotide
cccgtctctactaaaaatac

SEQ ID NO: 5833 - DNA, 20 bp, Artificial Sequence
  Description of Artificial Sequence: Synthetic oligonucleotide
ccgtctctactaaaaataca

SEQ ID NO: 5834 - DNA, 20 bp, Artificial Sequence
  Description of Artificial Sequence: Synthetic oligonucleotide
cgtctctactaaaaatacaa

SEQ ID NO: 5835 - DNA, 20 bp, Artificial Sequence
  Description of Artificial Sequence: Synthetic oligonucleotide
gtctctactaaaaatacaaa

SEQ ID NO: 5836 - DNA, 20 bp, Artificial Sequence
  Description of Artificial Sequence: Synthetic oligonucleotide
tctctactaaaaatacaaaa

SEQ ID NO: 5837 - DNA, 20 bp, Artificial Sequence
  Description of Artificial Sequence: Synthetic oligonucleotide
ctctactaaaaatacaaaac

SEQ ID NO: 5838 - DNA, 20 bp, Artificial Sequence
  Description of Artificial Sequence: Synthetic oligonucleotide
tctactaaaaatacaaaaca

SEQ ID NO: 5839 - DNA, 20 bp, Artificial Sequence
  Description of Artificial Sequence: Synthetic oligonucleotide
ctactaaaaatacaaaacaa

SEQ ID NO: 5840 - DNA, 20 bp, Artificial Sequence
  Description of Artificial Sequence: Synthetic oligonucleotide
tactaaaaatacaaaacaat

SEQ ID NO: 5841 - DNA, 20 bp, Artificial Sequence
  Description of Artificial Sequence: Synthetic oligonucleotide
actaaaaatacaaaacaatt

SEQ ID NO: 5842 - DNA, 20 bp, Artificial Sequence
  Description of Artificial Sequence: Synthetic oligonucleotide
ctaaaaatacaaaacaatta

SEQ ID NO: 5843 - DNA, 20 bp, Artificial Sequence
  Description of Artificial Sequence: Synthetic oligonucleotide
taaaaatacaaaacaattat

SEQ ID NO: 5844 - DNA, 20 bp, Artificial Sequence
  Description of Artificial Sequence: Synthetic oligonucleotide
aaaaatacaaaacaattatc

SEQ ID NO: 5845 - DNA, 20 bp, Artificial Sequence
  Description of Artificial Sequence: Synthetic oligonucleotide
aaaatacaaaacaattatct

SEQ ID NO: 5846 - DNA, 20 bp, Artificial Sequence
  Description of Artificial Sequence: Synthetic oligonucleotide
aaatacaaaacaattatctg

SEQ ID NO: 5847 - DNA, 20 bp, Artificial Sequence
  Description of Artificial Sequence: Synthetic oligonucleotide
aatacaaaacaattatctgt

SEQ ID NO: 5848 - DNA, 20 bp, Artificial Sequence
  Description of Artificial Sequence: Synthetic oligonucleotide
atacaaaacaattatctgtg

SEQ ID NO: 5849 - DNA, 20 bp, Artificial Sequence
  Description of Artificial Sequence: Synthetic oligonucleotide
tacaaaacaattatctgtgc

SEQ ID NO: 5850 - DNA, 20 bp, Artificial Sequence
  Description of Artificial Sequence: Synthetic oligonucleotide
acaaaacaattatctgtgca

SEQ ID NO: 5851 - DNA, 20 bp, Artificial Sequence
  Description of Artificial Sequence: Synthetic oligonucleotide
caaaacaattatctgtgcat

SEQ ID NO: 5852 - DNA, 20 bp, Artificial Sequence
  Description of Artificial Sequence: Synthetic oligonucleotide
aaaacaattatctgtgcatg

SEQ ID NO: 5853 - DNA, 20 bp, Artificial Sequence
  Description of Artificial Sequence: Synthetic oligonucleotide
aaacaattatctgtgcatgg

SEQ ID NO: 5854 - DNA, 20 bp, Artificial Sequence
  Description of Artificial Sequence: Synthetic oligonucleotide
aacaattatctgtgcatggt

SEQ ID NO: 5855 - DNA, 20 bp, Artificial Sequence
  Description of Artificial Sequence: Synthetic oligonucleotide
acaattatctgtgcatggtg

SEQ ID NO: 5856 - DNA, 20 bp, Artificial Sequence
  Description of Artificial Sequence: Synthetic oligonucleotide
caattatctgtgcatggtgg

SEQ ID NO: 5857 - DNA, 20 bp, Artificial Sequence
  Description of Artificial Sequence: Synthetic oligonucleotide
aattatctgtgcatggtggc

SEQ ID NO: 5858 - DNA, 20 bp, Artificial Sequence
  Description of Artificial Sequence: Synthetic oligonucleotide
attatctgtgcatggtggcg

SEQ ID NO: 5859 - DNA, 20 bp, Artificial Sequence
  Description of Artificial Sequence: Synthetic oligonucleotide
ttatctgtgcatggtggcgg

SEQ ID NO: 5860 - DNA, 20 bp, Artificial Sequence
  Description of Artificial Sequence: Synthetic oligonucleotide
tatctgtgcatggtggcggg

SEQ ID NO: 5861 - DNA, 20 bp, Artificial Sequence
  Description of Artificial Sequence: Synthetic oligonucleotide
atctgtgcatggtggcggga

SEQ ID NO: 5862 - DNA, 20 bp, Artificial Sequence
  Description of Artificial Sequence: Synthetic oligonucleotide
tctgtgcatggtggcgggaa

SEQ ID NO: 5863 - DNA, 20 bp, Artificial Sequence
  Description of Artificial Sequence: Synthetic oligonucleotide
ctgtgcatggtggcgggaac

SEQ ID NO: 5864 - DNA, 20 bp, Artificial Sequence
  Description of Artificial Sequence: Synthetic oligonucleotide
tgtgcatggtggcgggaacc

SEQ ID NO: 5865 - DNA, 20 bp, Artificial Sequence
  Description of Artificial Sequence: Synthetic oligonucleotide
gtgcatggtggcgggaacct

SEQ ID NO: 5866 - DNA, 20 bp, Artificial Sequence
  Description of Artificial Sequence: Synthetic oligonucleotide
tgcatggtggcgggaacctg

SEQ ID NO: 5867 - DNA, 20 bp, Artificial Sequence
  Description of Artificial Sequence: Synthetic oligonucleotide
gcatggtggcgggaacctgt

SEQ ID NO: 5868 - DNA, 20 bp, Artificial Sequence
  Description of Artificial Sequence: Synthetic oligonucleotide
catggtggcgggaacctgta

SEQ ID NO: 5869 - DNA, 20 bp, Artificial Sequence
  Description of Artificial Sequence: Synthetic oligonucleotide
atggtggcgggaacctgtaa

SEQ ID NO: 5870 - DNA, 20 bp, Artificial Sequence
  Description of Artificial Sequence: Synthetic oligonucleotide
tggtggcgggaacctgtaat

SEQ ID NO: 5871 - DNA, 20 bp, Artificial Sequence
  Description of Artificial Sequence: Synthetic oligonucleotide
ggtggcgggaacctgtaatc

SEQ ID NO: 5872 - DNA, 20 bp, Artificial Sequence
  Description of Artificial Sequence: Synthetic oligonucleotide
gtggcgggaacctgtaatcc

SEQ ID NO: 5873 - DNA, 20 bp, Artificial Sequence
  Description of Artificial Sequence: Synthetic oligonucleotide
tggcgggaacctgtaatccc

SEQ ID NO: 5874 - DNA, 20 bp, Artificial Sequence
  Description of Artificial Sequence: Synthetic oligonucleotide
ggcgggaacctgtaatccca

SEQ ID NO: 5875 - DNA, 20 bp, Artificial Sequence
  Description of Artificial Sequence: Synthetic oligonucleotide
gcgggaacctgtaatcccag

SEQ ID NO: 5876 - DNA, 20 bp, Artificial Sequence
  Description of Artificial Sequence: Synthetic oligonucleotide
cgggaacctgtaatcccagc

SEQ ID NO: 5877 - DNA, 20 bp, Artificial Sequence
  Description of Artificial Sequence: Synthetic oligonucleotide
gggaacctgtaatcccagct

SEQ ID NO: 5878 - DNA, 20 bp, Artificial Sequence
  Description of Artificial Sequence: Synthetic oligonucleotide
ggaacctgtaatcccagcta

SEQ ID NO: 5879 - DNA, 20 bp, Artificial Sequence
  Description of Artificial Sequence: Synthetic oligonucleotide
gaacctgtaatcccagctac

SEQ ID NO: 5880 - DNA, 20 bp, Artificial Sequence
  Description of Artificial Sequence: Synthetic oligonucleotide
aacctgtaatcccagctact

SEQ ID NO: 5881 - DNA, 20 bp, Artificial Sequence
  Description of Artificial Sequence: Synthetic oligonucleotide
acctgtaatcccagctactc

SEQ ID NO: 5882 - DNA, 20 bp, Artificial Sequence
  Description of Artificial Sequence: Synthetic oligonucleotide
cctgtaatcccagctactca

SEQ ID NO: 5883 - DNA, 20 bp, Artificial Sequence
  Description of Artificial Sequence: Synthetic oligonucleotide
ctgtaatcccagctactcag

SEQ ID NO: 5884 - DNA, 20 bp, Artificial Sequence
  Description of Artificial Sequence: Synthetic oligonucleotide
tgtaatcccagctactcagg

SEQ ID NO: 5885 - DNA, 20 bp, Artificial Sequence
  Description of Artificial Sequence: Synthetic oligonucleotide
gtaatcccagctactcagga

SEQ ID NO: 5886 - DNA, 20 bp, Artificial Sequence
  Description of Artificial Sequence: Synthetic oligonucleotide
taatcccagctactcaggag

SEQ ID NO: 5887 - DNA, 20 bp, Artificial Sequence
  Description of Artificial Sequence: Synthetic oligonucleotide
aatcccagctactcaggagg

SEQ ID NO: 5888 - DNA, 20 bp, Artificial Sequence
  Description of Artificial Sequence: Synthetic oligonucleotide
atcccagctactcaggaggc

SEQ ID NO: 5889 - DNA, 20 bp, Artificial Sequence
  Description of Artificial Sequence: Synthetic oligonucleotide
tcccagctactcaggaggct

SEQ ID NO: 5890 - DNA, 20 bp, Artificial Sequence
  Description of Artificial Sequence: Synthetic oligonucleotide
cccagctactcaggaggctg

SEQ ID NO: 5891 - DNA, 20 bp, Artificial Sequence
  Description of Artificial Sequence: Synthetic oligonucleotide
ccagctactcaggaggctga

SEQ ID NO: 5892 - DNA, 20 bp, Artificial Sequence
  Description of Artificial Sequence: Synthetic oligonucleotide
cagctactcaggaggctgag

SEQ ID NO: 5893 - DNA, 20 bp, Artificial Sequence
  Description of Artificial Sequence: Synthetic oligonucleotide
agctactcaggaggctgagg

SEQ ID NO: 5894 - DNA, 20 bp, Artificial Sequence
  Description of Artificial Sequence: Synthetic oligonucleotide
gctactcaggaggctgaggc

SEQ ID NO: 5895 - DNA, 20 bp, Artificial Sequence
  Description of Artificial Sequence: Synthetic oligonucleotide
ctactcaggaggctgaggca

SEQ ID NO: 5896 - DNA, 20 bp, Artificial Sequence
  Description of Artificial Sequence: Synthetic oligonucleotide
tactcaggaggctgaggcag

SEQ ID NO: 5897 - DNA, 20 bp, Artificial Sequence
  Description of Artificial Sequence: Synthetic oligonucleotide
actcaggaggctgaggcagg

SEQ ID NO: 5898 - DNA, 20 bp, Artificial Sequence
  Description of Artificial Sequence: Synthetic oligonucleotide
ctcaggaggctgaggcagga

SEQ ID NO: 5899 - DNA, 20 bp, Artificial Sequence
  Description of Artificial Sequence: Synthetic oligonucleotide
tcaggaggctgaggcaggag

SEQ ID NO: 5900 - DNA, 20 bp, Artificial Sequence
  Description of Artificial Sequence: Synthetic oligonucleotide
caggaggctgaggcaggaga

SEQ ID NO: 5901 - DNA, 20 bp, Artificial Sequence
  Description of Artificial Sequence: Synthetic oligonucleotide
aggaggctgaggcaggagaa

SEQ ID NO: 5902 - DNA, 20 bp, Artificial Sequence
  Description of Artificial Sequence: Synthetic oligonucleotide
ggaggctgaggcaggagaat

SEQ ID NO: 5903 - DNA, 20 bp, Artificial Sequence
  Description of Artificial Sequence: Synthetic oligonucleotide
gaggctgaggcaggagaatc

SEQ ID NO: 5904 - DNA, 20 bp, Artificial Sequence
  Description of Artificial Sequence: Synthetic oligonucleotide
aggctgaggcaggagaatca

SEQ ID NO: 5905 - DNA, 20 bp, Artificial Sequence
  Description of Artificial Sequence: Synthetic oligonucleotide
ggctgaggcaggagaatcac

SEQ ID NO: 5906 - DNA, 20 bp, Artificial Sequence
  Description of Artificial Sequence: Synthetic oligonucleotide
gctgaggcaggagaatcact

SEQ ID NO: 5907 - DNA, 20 bp, Artificial Sequence
  Description of Artificial Sequence: Synthetic oligonucleotide
ctgaggcaggagaatcactt

SEQ ID NO: 5908 - DNA, 20 bp, Artificial Sequence
  Description of Artificial Sequence: Synthetic oligonucleotide
tgaggcaggagaatcacttg

SEQ ID NO: 5909 - DNA, 20 bp, Artificial Sequence
  Description of Artificial Sequence: Synthetic oligonucleotide
gaggcaggagaatcacttga

SEQ ID NO: 5910 - DNA, 20 bp, Artificial Sequence
  Description of Artificial Sequence: Synthetic oligonucleotide
aggcaggagaatcacttgaa

SEQ ID NO: 5911 - DNA, 20 bp, Artificial Sequence
  Description of Artificial Sequence: Synthetic oligonucleotide
ggcaggagaatcacttgaac

SEQ ID NO: 5912 - DNA, 20 bp, Artificial Sequence
  Description of Artificial Sequence: Synthetic oligonucleotide
gcaggagaatcacttgaacc

SEQ ID NO: 5913 - DNA, 20 bp, Artificial Sequence
  Description of Artificial Sequence: Synthetic oligonucleotide
caggagaatcacttgaaccc

SEQ ID NO: 5914 - DNA, 20 bp, Artificial Sequence
  Description of Artificial Sequence: Synthetic oligonucleotide
aggagaatcacttgaaccca

SEQ ID NO: 5915 - DNA, 20 bp, Artificial Sequence
  Description of Artificial Sequence: Synthetic oligonucleotide
ggagaatcacttgaacccag

SEQ ID NO: 5916 - DNA, 20 bp, Artificial Sequence
  Description of Artificial Sequence: Synthetic oligonucleotide
gagaatcacttgaacccagg

SEQ ID NO: 5917 - DNA, 20 bp, Artificial Sequence
  Description of Artificial Sequence: Synthetic oligonucleotide
agaatcacttgaacccagga

SEQ ID NO: 5918 - DNA, 20 bp, Artificial Sequence
  Description of Artificial Sequence: Synthetic oligonucleotide
gaatcacttgaacccaggag

SEQ ID NO: 5919 - DNA, 20 bp, Artificial Sequence
  Description of Artificial Sequence: Synthetic oligonucleotide
aatcacttgaacccaggagg

SEQ ID NO: 5920 - DNA, 20 bp, Artificial Sequence
  Description of Artificial Sequence: Synthetic oligonucleotide
atcacttgaacccaggaggc

SEQ ID NO: 5921 - DNA, 20 bp, Artificial Sequence
  Description of Artificial Sequence: Synthetic oligonucleotide
tcacttgaacccaggaggcg

SEQ ID NO: 5922 - DNA, 20 bp, Artificial Sequence
  Description of Artificial Sequence: Synthetic oligonucleotide
cacttgaacccaggaggcgg

SEQ ID NO: 5923 - DNA, 20 bp, Artificial Sequence
  Description of Artificial Sequence: Synthetic oligonucleotide
acttgaacccaggaggcgga

SEQ ID NO: 5924 - DNA, 20 bp, Artificial Sequence
  Description of Artificial Sequence: Synthetic oligonucleotide
cttgaacccaggaggcggag

SEQ ID NO: 5925 - DNA, 20 bp, Artificial Sequence
  Description of Artificial Sequence: Synthetic oligonucleotide
ttgaacccaggaggcggagg

SEQ ID NO: 5926 - DNA, 20 bp, Artificial Sequence
  Description of Artificial Sequence: Synthetic oligonucleotide
tgaacccaggaggcggaggc

SEQ ID NO: 5927 - DNA, 20 bp, Artificial Sequence
  Description of Artificial Sequence: Synthetic oligonucleotide
gaacccaggaggcggaggct

SEQ ID NO: 5928 - DNA, 20 bp, Artificial Sequence
  Description of Artificial Sequence: Synthetic oligonucleotide
aacccaggaggcggaggctg

SEQ ID NO: 5929 - DNA, 20 bp, Artificial Sequence
  Description of Artificial Sequence: Synthetic oligonucleotide
acccaggaggcggaggctgc

SEQ ID NO: 5930 - DNA, 20 bp, Artificial Sequence
  Description of Artificial Sequence: Synthetic oligonucleotide
cccaggaggcggaggctgca

SEQ ID NO: 5931 - DNA, 20 bp, Artificial Sequence
  Description of Artificial Sequence: Synthetic oligonucleotide
ccaggaggcggaggctgcag

SEQ ID NO: 5932 - DNA, 20 bp, Artificial Sequence
  Description of Artificial Sequence: Synthetic oligonucleotide
caggaggcggaggctgcagt

SEQ ID NO: 5933 - DNA, 20 bp, Artificial Sequence
  Description of Artificial Sequence: Synthetic oligonucleotide
aggaggcggaggctgcagtg

SEQ ID NO: 5934 - DNA, 20 bp, Artificial Sequence
  Description of Artificial Sequence: Synthetic oligonucleotide
ggaggcggaggctgcagtga

SEQ ID NO: 5935 - DNA, 20 bp, Artificial Sequence
  Description of Artificial Sequence: Synthetic oligonucleotide
gaggcggaggctgcagtgag

SEQ ID NO: 5936 - DNA, 20 bp, Artificial Sequence
  Description of Artificial Sequence: Synthetic oligonucleotide
aggcggaggctgcagtgagc

SEQ ID NO: 5937 - DNA, 20 bp, Artificial Sequence
  Description of Artificial Sequence: Synthetic oligonucleotide
ggcggaggctgcagtgagcc

SEQ ID NO: 5938 - DNA, 20 bp, Artificial Sequence
  Description of Artificial Sequence: Synthetic oligonucleotide
gcggaggctgcagtgagcca

SEQ ID NO: 5939 - DNA, 20 bp, Artificial Sequence
  Description of Artificial Sequence: Synthetic oligonucleotide
cggaggctgcagtgagccaa

SEQ ID NO: 5940 - DNA, 20 bp, Artificial Sequence
  Description of Artificial Sequence: Synthetic oligonucleotide
ggaggctgcagtgagccaag

SEQ ID NO: 5941 - DNA, 20 bp, Artificial Sequence
  Description of Artificial Sequence: Synthetic oligonucleotide
gaggctgcagtgagccaaga

SEQ ID NO: 5942 - DNA, 20 bp, Artificial Sequence
  Description of Artificial Sequence: Synthetic oligonucleotide
aggctgcagtgagccaagat

SEQ ID NO: 5943 - DNA, 20 bp, Artificial Sequence
  Description of Artificial Sequence: Synthetic oligonucleotide
ggctgcagtgagccaagatc

SEQ ID NO: 5944 - DNA, 20 bp, Artificial Sequence
  Description of Artificial Sequence: Synthetic oligonucleotide
gctgcagtgagccaagatca

SEQ ID NO: 5945 - DNA, 20 bp, Artificial Sequence
  Description of Artificial Sequence: Synthetic oligonucleotide
ctgcagtgagccaagatcac

SEQ ID NO: 5946 - DNA, 20 bp, Artificial Sequence
  Description of Artificial Sequence: Synthetic oligonucleotide
tgcagtgagccaagatcacg

SEQ ID NO: 5947 - DNA, 20 bp, Artificial Sequence
  Description of Artificial Sequence: Synthetic oligonucleotide
gcagtgagccaagatcacgt

SEQ ID NO: 5948 - DNA, 20 bp, Artificial Sequence
  Description of Artificial Sequence: Synthetic oligonucleotide
cagtgagccaagatcacgtc

SEQ ID NO: 5949 - DNA, 20 bp, Artificial Sequence
  Description of Artificial Sequence: Synthetic oligonucleotide
agtgagccaagatcacgtca

SEQ ID NO: 5950 - DNA, 20 bp, Artificial Sequence
  Description of Artificial Sequence: Synthetic oligonucleotide
gtgagccaagatcacgtcac

SEQ ID NO: 5951 - DNA, 20 bp, Artificial Sequence
  Description of Artificial Sequence: Synthetic oligonucleotide
tgagccaagatcacgtcact

SEQ ID NO: 5952 - DNA, 20 bp, Artificial Sequence
  Description of Artificial Sequence: Synthetic oligonucleotide
gagccaagatcacgtcactt

SEQ ID NO: 5953 - DNA, 20 bp, Artificial Sequence
  Description of Artificial Sequence: Synthetic oligonucleotide
agccaagatcacgtcacttg

SEQ ID NO: 5954 - DNA, 20 bp, Artificial Sequence
  Description of Artificial Sequence: Synthetic oligonucleotide
gccaagatcacgtcacttgc

SEQ ID NO: 5955 - DNA, 20 bp, Artificial Sequence
  Description of Artificial Sequence: Synthetic oligonucleotide
ccaagatcacgtcacttgca

SEQ ID NO: 5956 - DNA, 20 bp, Artificial Sequence
  Description of Artificial Sequence: Synthetic oligonucleotide
caagatcacgtcacttgcac

SEQ ID NO: 5957 - DNA, 20 bp, Artificial Sequence
  Description of Artificial Sequence: Synthetic oligonucleotide
aagatcacgtcacttgcact

SEQ ID NO: 5958 - DNA, 20 bp, Artificial Sequence
  Description of Artificial Sequence: Synthetic oligonucleotide
agatcacgtcacttgcactc

SEQ ID NO: 5959 - DNA, 20 bp, Artificial Sequence
  Description of Artificial Sequence: Synthetic oligonucleotide
gatcacgtcacttgcactcc

SEQ ID NO: 5960 - DNA, 20 bp, Artificial Sequence
  Description of Artificial Sequence: Synthetic oligonucleotide
atcacgtcacttgcactcca

SEQ ID NO: 5961 - DNA, 20 bp, Artificial Sequence
  Description of Artificial Sequence: Synthetic oligonucleotide
tcacgtcacttgcactccag

SEQ ID NO: 5962 - DNA, 20 bp, Artificial Sequence
  Description of Artificial Sequence: Synthetic oligonucleotide
cacgtcacttgcactccagc

SEQ ID NO: 5963 - DNA, 20 bp, Artificial Sequence
  Description of Artificial Sequence: Synthetic oligonucleotide
acgtcacttgcactccagcc

SEQ ID NO: 5964 - DNA, 20 bp, Artificial Sequence
  Description of Artificial Sequence: Synthetic oligonucleotide
cgtcacttgcactccagcct

SEQ ID NO: 5965 - DNA, 20 bp, Artificial Sequence
  Description of Artificial Sequence: Synthetic oligonucleotide
gtcacttgcactccagcctg

SEQ ID NO: 5966 - DNA, 20 bp, Artificial Sequence
  Description of Artificial Sequence: Synthetic oligonucleotide
tcacttgcactccagcctgg

SEQ ID NO: 5967 - DNA, 20 bp, Artificial Sequence
  Description of Artificial Sequence: Synthetic oligonucleotide
cacttgcactccagcctggg

SEQ ID NO: 5968 - DNA, 20 bp, Artificial Sequence
  Description of Artificial Sequence: Synthetic oligonucleotide
acttgcactccagcctggga

SEQ ID NO: 5969 - DNA, 20 bp, Artificial Sequence
  Description of Artificial Sequence: Synthetic oligonucleotide
cttgcactccagcctgggag

SEQ ID NO: 5970 - DNA, 20 bp, Artificial Sequence
  Description of Artificial Sequence: Synthetic oligonucleotide
ttgcactccagcctgggaga

SEQ ID NO: 5971 - DNA, 20 bp, Artificial Sequence
  Description of Artificial Sequence: Synthetic oligonucleotide
tgcactccagcctgggagac

SEQ ID NO: 5972 - DNA, 20 bp, Artificial Sequence
  Description of Artificial Sequence: Synthetic oligonucleotide
gcactccagcctgggagaca

SEQ ID NO: 5973 - DNA, 20 bp, Artificial Sequence
  Description of Artificial Sequence: Synthetic oligonucleotide
cactccagcctgggagacac

SEQ ID NO: 5974 - DNA, 20 bp, Artificial Sequence
  Description of Artificial Sequence: Synthetic oligonucleotide
actccagcctgggagacaca

SEQ ID NO: 5975 - DNA, 20 bp, Artificial Sequence
  Description of Artificial Sequence: Synthetic oligonucleotide
ctccagcctgggagacacag

SEQ ID NO: 5976 - DNA, 20 bp, Artificial Sequence
  Description of Artificial Sequence: Synthetic oligonucleotide
tccagcctgggagacacagc

SEQ ID NO: 5977 - DNA, 20 bp, Artificial Sequence
  Description of Artificial Sequence: Synthetic oligonucleotide
ccagcctgggagacacagcg

SEQ ID NO: 5978 - DNA, 20 bp, Artificial Sequence
  Description of Artificial Sequence: Synthetic oligonucleotide
cagcctgggagacacagcgg

SEQ ID NO: 5979 - DNA, 20 bp, Artificial Sequence
  Description of Artificial Sequence: Synthetic oligonucleotide
agcctgggagacacagcggg

SEQ ID NO: 5980 - DNA, 20 bp, Artificial Sequence
  Description of Artificial Sequence: Synthetic oligonucleotide
gcctgggagacacagcggga

SEQ ID NO: 5981 - DNA, 20 bp, Artificial Sequence
  Description of Artificial Sequence: Synthetic oligonucleotide
cctgggagacacagcgggac

SEQ ID NO: 5982 - DNA, 20 bp, Artificial Sequence
  Description of Artificial Sequence: Synthetic oligonucleotide
ctgggagacacagcgggact

SEQ ID NO: 5983 - DNA, 20 bp, Artificial Sequence
  Description of Artificial Sequence: Synthetic oligonucleotide
tgggagacacagcgggactc

SEQ ID NO: 5984 - DNA, 20 bp, Artificial Sequence
  Description of Artificial Sequence: Synthetic oligonucleotide
gggagacacagcgggactct

SEQ ID NO: 5985 - DNA, 20 bp, Artificial Sequence
  Description of Artificial Sequence: Synthetic oligonucleotide
ggagacacagcgggactctg

SEQ ID NO: 5986 - DNA, 20 bp, Artificial Sequence
  Description of Artificial Sequence: Synthetic oligonucleotide
gagacacagcgggactctgt

SEQ ID NO: 5987 - DNA, 20 bp, Artificial Sequence
  Description of Artificial Sequence: Synthetic oligonucleotide
agacacagcgggactctgtc

SEQ ID NO: 5988 - DNA, 20 bp, Artificial Sequence
  Description of Artificial Sequence: Synthetic oligonucleotide
gacacagcgggactctgtct

SEQ ID NO: 5989 - DNA, 20 bp, Artificial Sequence
  Description of Artificial Sequence: Synthetic oligonucleotide
acacagcgggactctgtctc

SEQ ID NO: 5990 - DNA, 20 bp, Artificial Sequence
  Description of Artificial Sequence: Synthetic oligonucleotide
cacagcgggactctgtctca

SEQ ID NO: 5991 - DNA, 20 bp, Artificial Sequence
  Description of Artificial Sequence: Synthetic oligonucleotide
acagcgggactctgtctcaa

SEQ ID NO: 5992 - DNA, 20 bp, Artificial Sequence
  Description of Artificial Sequence: Synthetic oligonucleotide
cagcgggactctgtctcaaa

SEQ ID NO: 5993 - DNA, 20 bp, Artificial Sequence
  Description of Artificial Sequence: Synthetic oligonucleotide
agcgggactctgtctcaaaa

SEQ ID NO: 5994 - DNA, 20 bp, Artificial Sequence
  Description of Artificial Sequence: Synthetic oligonucleotide
gcgggactctgtctcaaaaa

SEQ ID NO: 5995 - DNA, 20 bp, Artificial Sequence
  Description of Artificial Sequence: Synthetic oligonucleotide
cgggactctgtctcaaaaaa

SEQ ID NO: 5996 - DNA, 20 bp, Artificial Sequence
  Description of Artificial Sequence: Synthetic oligonucleotide
gggactctgtctcaaaaaat

SEQ ID NO: 5997 - DNA, 20 bp, Artificial Sequence
  Description of Artificial Sequence: Synthetic oligonucleotide
ggactctgtctcaaaaaata

SEQ ID NO: 5998 - DNA, 20 bp, Artificial Sequence
  Description of Artificial Sequence: Synthetic oligonucleotide
gactctgtctcaaaaaataa

SEQ ID NO: 5999 - DNA, 20 bp, Artificial Sequence
  Description of Artificial Sequence: Synthetic oligonucleotide
actctgtctcaaaaaataaa

SEQ ID NO: 6000 - DNA, 20 bp, Artificial Sequence
  Description of Artificial Sequence: Synthetic oligonucleotide
ctctgtctcaaaaaataaat

SEQ ID NO: 6001 - DNA, 20 bp, Artificial Sequence
  Description of Artificial Sequence: Synthetic oligonucleotide
tctgtctcaaaaaataaata

SEQ ID NO: 6002 - DNA, 20 bp, Artificial Sequence
  Description of Artificial Sequence: Synthetic oligonucleotide
ctgtctcaaaaaataaataa

SEQ ID NO: 6003 - DNA, 20 bp, Artificial Sequence
  Description of Artificial Sequence: Synthetic oligonucleotide
tgtctcaaaaaataaataag

SEQ ID NO: 6004 - DNA, 20 bp, Artificial Sequence
  Description of Artificial Sequence: Synthetic oligonucleotide
gtctcaaaaaataaataagt

SEQ ID NO: 6005 - DNA, 20 bp, Artificial Sequence
  Description of Artificial Sequence: Synthetic oligonucleotide
tctcaaaaaataaataagta

SEQ ID NO: 6006 - DNA, 20 bp, Artificial Sequence
  Description of Artificial Sequence: Synthetic oligonucleotide
ctcaaaaaataaataagtag

SEQ ID NO: 6007 - DNA, 20 bp, Artificial Sequence
  Description of Artificial Sequence: Synthetic oligonucleotide
tcaaaaaataaataagtagg

SEQ ID NO: 6008 - DNA, 20 bp, Artificial Sequence
  Description of Artificial Sequence: Synthetic oligonucleotide
caaaaaataaataagtaggc

SEQ ID NO: 6009 - DNA, 20 bp, Artificial Sequence
  Description of Artificial Sequence: Synthetic oligonucleotide
aaaaaataaataagtaggcc

SEQ ID NO: 6010 - DNA, 20 bp, Artificial Sequence
  Description of Artificial Sequence: Synthetic oligonucleotide
aaaaataaataagtaggccg

SEQ ID NO: 6011 - DNA, 20 bp, Artificial Sequence
  Description of Artificial Sequence: Synthetic oligonucleotide
aaaataaataagtaggccgg

SEQ ID NO: 6012 - DNA, 20 bp, Artificial Sequence
  Description of Artificial Sequence: Synthetic oligonucleotide
aaataaataagtaggccggg

SEQ ID NO: 6013 - DNA, 20 bp, Artificial Sequence
  Description of Artificial Sequence: Synthetic oligonucleotide
aataaataagtaggccgggc

SEQ ID NO: 6014 - DNA, 20 bp, Artificial Sequence
  Description of Artificial Sequence: Synthetic oligonucleotide
ataaataagtaggccgggcg

SEQ ID NO: 6015 - DNA, 20 bp, Artificial Sequence
  Description of Artificial Sequence: Synthetic oligonucleotide
taaataagtaggccgggcgc

SEQ ID NO: 6016 - DNA, 20 bp, Artificial Sequence
  Description of Artificial Sequence: Synthetic oligonucleotide
aaataagtaggccgggcgcg

SEQ ID NO: 6017 - DNA, 20 bp, Artificial Sequence
  Description of Artificial Sequence: Synthetic oligonucleotide
aataagtaggccgggcgcgg

SEQ ID NO: 6018 - DNA, 20 bp, Artificial Sequence
  Description of Artificial Sequence: Synthetic oligonucleotide
ataagtaggccgggcgcggt

SEQ ID NO: 6019 - DNA, 20 bp, Artificial Sequence
  Description of Artificial Sequence: Synthetic oligonucleotide
taagtaggccgggcgcggtg

SEQ ID NO: 6020 - DNA, 20 bp, Artificial Sequence
  Description of Artificial Sequence: Synthetic oligonucleotide
aagtaggccgggcgcggtgg

SEQ ID NO: 6021 - DNA, 20 bp, Artificial Sequence
  Description of Artificial Sequence: Synthetic oligonucleotide
agtaggccgggcgcggtggc

SEQ ID NO: 6022 - DNA, 20 bp, Artificial Sequence
  Description of Artificial Sequence: Synthetic oligonucleotide
gtaggccgggcgcggtggct

SEQ ID NO: 6023 - DNA, 20 bp, Artificial Sequence
  Description of Artificial Sequence: Synthetic oligonucleotide
taggccgggcgcggtggctc

SEQ ID NO: 6024 - DNA, 20 bp, Artificial Sequence
  Description of Artificial Sequence: Synthetic oligonucleotide
aggccgggcgcggtggctca

SEQ ID NO: 6025 - DNA, 20 bp, Artificial Sequence
  Description of Artificial Sequence: Synthetic oligonucleotide
ggccgggcgcggtggctcac

SEQ ID NO: 6026 - DNA, 20 bp, Artificial Sequence
  Description of Artificial Sequence: Synthetic oligonucleotide
gccgggcgcggtggctcacg

SEQ ID NO: 6027 - DNA, 20 bp, Artificial Sequence
  Description of Artificial Sequence: Synthetic oligonucleotide
ccgggcgcggtggctcacgc

SEQ ID NO: 6028 - DNA, 20 bp, Artificial Sequence
  Description of Artificial Sequence: Synthetic oligonucleotide
cgggcgcggtggctcacgcc

SEQ ID NO: 6029 - DNA, 20 bp, Artificial Sequence
  Description of Artificial Sequence: Synthetic oligonucleotide
gggcgcggtggctcacgcct

SEQ ID NO: 6030 - DNA, 20 bp, Artificial Sequence
  Description of Artificial Sequence: Synthetic oligonucleotide
ggcgcggtggctcacgcctg

SEQ ID NO: 6031 - DNA, 20 bp, Artificial Sequence
  Description of Artificial Sequence: Synthetic oligonucleotide
gcgcggtggctcacgcctgt

SEQ ID NO: 6032 - DNA, 20 bp, Artificial Sequence
  Description of Artificial Sequence: Synthetic oligonucleotide
cgcggtggctcacgcctgta

SEQ ID NO: 6033 - DNA, 20 bp, Artificial Sequence
  Description of Artificial Sequence: Synthetic oligonucleotide
gcggtggctcacgcctgtaa

SEQ ID NO: 6034 - DNA, 20 bp, Artificial Sequence
  Description of Artificial Sequence: Synthetic oligonucleotide
cggtggctcacgcctgtaat

SEQ ID NO: 6035 - DNA, 20 bp, Artificial Sequence
  Description of Artificial Sequence: Synthetic oligonucleotide
ggtggctcacgcctgtaatc

SEQ ID NO: 6036 - DNA, 20 bp, Artificial Sequence
  Description of Artificial Sequence: Synthetic oligonucleotide
gtggctcacgcctgtaatcc

SEQ ID NO: 6037 - DNA, 20 bp, Artificial Sequence
  Description of Artificial Sequence: Synthetic oligonucleotide
tggctcacgcctgtaatccc

SEQ ID NO: 6038 - DNA, 20 bp, Artificial Sequence
  Description of Artificial Sequence: Synthetic oligonucleotide
ggctcacgcctgtaatccca

SEQ ID NO: 6039 - DNA, 20 bp, Artificial Sequence
  Description of Artificial Sequence: Synthetic oligonucleotide
gctcacgcctgtaatcccag

SEQ ID NO: 6040 - DNA, 20 bp, Artificial Sequence
  Description of Artificial Sequence: Synthetic oligonucleotide
ctcacgcctgtaatcccagc

SEQ ID NO: 6041 - DNA, 20 bp, Artificial Sequence
  Description of Artificial Sequence: Synthetic oligonucleotide
tcacgcctgtaatcccagca

SEQ ID NO: 6042 - DNA, 20 bp, Artificial Sequence
  Description of Artificial Sequence: Synthetic oligonucleotide
cacgcctgtaatcccagcac

SEQ ID NO: 6043 - DNA, 20 bp, Artificial Sequence
  Description of Artificial Sequence: Synthetic oligonucleotide
acgcctgtaatcccagcact

SEQ ID NO: 6044 - DNA, 20 bp, Artificial Sequence
  Description of Artificial Sequence: Synthetic oligonucleotide
cgcctgtaatcccagcactt

SEQ ID NO: 6045 - DNA, 20 bp, Artificial Sequence
  Description of Artificial Sequence: Synthetic oligonucleotide
gcctgtaatcccagcacttt

SEQ ID NO: 6046 - DNA, 20 bp, Artificial Sequence
  Description of Artificial Sequence: Synthetic oligonucleotide
cctgtaatcccagcactttg

SEQ ID NO: 6047 - DNA, 20 bp, Artificial Sequence
  Description of Artificial Sequence: Synthetic oligonucleotide
ctgtaatcccagcactttgg

SEQ ID NO: 6048 - DNA, 20 bp, Artificial Sequence
  Description of Artificial Sequence: Synthetic oligonucleotide
tgtaatcccagcactttggg

SEQ ID NO: 6049 - DNA, 20 bp, Artificial Sequence
  Description of Artificial Sequence: Synthetic oligonucleotide
gtaatcccagcactttggga

SEQ ID NO: 6050 - DNA, 20 bp, Artificial Sequence
  Description of Artificial Sequence: Synthetic oligonucleotide
taatcccagcactttgggag

SEQ ID NO: 6051 - DNA, 20 bp, Artificial Sequence
  Description of Artificial Sequence: Synthetic oligonucleotide
aatcccagcactttgggagg

SEQ ID NO: 6052 - DNA, 20 bp, Artificial Sequence
  Description of Artificial Sequence: Synthetic oligonucleotide
atcccagcactttgggaggc

SEQ ID NO: 6053 - DNA, 20 bp, Artificial Sequence
  Description of Artificial Sequence: Synthetic oligonucleotide
tcccagcactttgggaggct

SEQ ID NO: 6054 - DNA, 20 bp, Artificial Sequence
  Description of Artificial Sequence: Synthetic oligonucleotide
cccagcactttgggaggctg

SEQ ID NO: 6055 - DNA, 20 bp, Artificial Sequence
  Description of Artificial Sequence: Synthetic oligonucleotide
ccagcactttgggaggctga

SEQ ID NO: 6056 - DNA, 20 bp, Artificial Sequence
  Description of Artificial Sequence: Synthetic oligonucleotide
cagcactttgggaggctgag

SEQ ID NO: 6057 - DNA, 20 bp, Artificial Sequence
  Description of Artificial Sequence: Synthetic oligonucleotide
agcactttgggaggctgagg

SEQ ID NO: 6058 - DNA, 20 bp, Artificial Sequence
  Description of Artificial Sequence: Synthetic oligonucleotide
gcactttgggaggctgaggc

SEQ ID NO: 6059 - DNA, 20 bp, Artificial Sequence
  Description of Artificial Sequence: Synthetic oligonucleotide
cactttgggaggctgaggca

SEQ ID NO: 6060 - DNA, 20 bp, Artificial Sequence
  Description of Artificial Sequence: Synthetic oligonucleotide
actttgggaggctgaggcag

SEQ ID NO: 6061 - DNA, 20 bp, Artificial Sequence
  Description of Artificial Sequence: Synthetic oligonucleotide
ctttgggaggctgaggcagg

SEQ ID NO: 6062 - DNA, 20 bp, Artificial Sequence
  Description of Artificial Sequence: Synthetic oligonucleotide
tttgggaggctgaggcaggc

SEQ ID NO: 6063 - DNA, 20 bp, Artificial Sequence
  Description of Artificial Sequence: Synthetic oligonucleotide
ttgggaggctgaggcaggca

SEQ ID NO: 6064 - DNA, 20 bp, Artificial Sequence
  Description of Artificial Sequence: Synthetic oligonucleotide
tgggaggctgaggcaggcag

SEQ ID NO: 6065 - DNA, 20 bp, Artificial Sequence
  Description of Artificial Sequence: Synthetic oligonucleotide
gggaggctgaggcaggcaga

SEQ ID NO: 6066 - DNA, 20 bp, Artificial Sequence
  Description of Artificial Sequence: Synthetic oligonucleotide
ggaggctgaggcaggcagat

SEQ ID NO: 6067 - DNA, 20 bp, Artificial Sequence
  Description of Artificial Sequence: Synthetic oligonucleotide
gaggctgaggcaggcagatc

SEQ ID NO: 6068 - DNA, 20 bp, Artificial Sequence
  Description of Artificial Sequence: Synthetic oligonucleotide
aggctgaggcaggcagatca

SEQ ID NO: 6069 - DNA, 20 bp, Artificial Sequence
  Description of Artificial Sequence: Synthetic oligonucleotide
ggctgaggcaggcagatcac

SEQ ID NO: 6070 - DNA, 20 bp, Artificial Sequence
  Description of Artificial Sequence: Synthetic oligonucleotide
gctgaggcaggcagatcacg

SEQ ID NO: 6071 - DNA, 20 bp, Artificial Sequence
  Description of Artificial Sequence: Synthetic oligonucleotide
ctgaggcaggcagatcacga

SEQ ID NO: 6072 - DNA, 20 bp, Artificial Sequence
  Description of Artificial Sequence: Synthetic oligonucleotide
tgaggcaggcagatcacgag

SEQ ID NO: 6073 - DNA, 20 bp, Artificial Sequence
  Description of Artificial Sequence: Synthetic oligonucleotide
gaggcaggcagatcacgagg

SEQ ID NO: 6074 - DNA, 20 bp, Artificial Sequence
  Description of Artificial Sequence: Synthetic oligonucleotide
aggcaggcagatcacgaggt

SEQ ID NO: 6075 - DNA, 20 bp, Artificial Sequence
  Description of Artificial Sequence: Synthetic oligonucleotide
ggcaggcagatcacgaggtc

SEQ ID NO: 6076 - DNA, 20 bp, Artificial Sequence
  Description of Artificial Sequence: Synthetic oligonucleotide
gcaggcagatcacgaggtca

SEQ ID NO: 6077 - DNA, 20 bp, Artificial Sequence
  Description of Artificial Sequence: Synthetic oligonucleotide
caggcagatcacgaggtcag

SEQ ID NO: 6078 - DNA, 20 bp, Artificial Sequence
  Description of Artificial Sequence: Synthetic oligonucleotide
aggcagatcacgaggtcagg

SEQ ID NO: 6079 - DNA, 20 bp, Artificial Sequence
  Description of Artificial Sequence: Synthetic oligonucleotide
ggcagatcacgaggtcagga

SEQ ID NO: 6080 - DNA, 20 bp, Artificial Sequence
  Description of Artificial Sequence: Synthetic oligonucleotide
gcagatcacgaggtcaggag

SEQ ID NO: 6081 - DNA, 20 bp, Artificial Sequence
  Description of Artificial Sequence: Synthetic oligonucleotide
cagatcacgaggtcaggaga

SEQ ID NO: 6082 - DNA, 20 bp, Artificial Sequence
  Description of Artificial Sequence: Synthetic oligonucleotide
agatcacgaggtcaggagat

SEQ ID NO: 6083 - DNA, 20 bp, Artificial Sequence
  Description of Artificial Sequence: Synthetic oligonucleotide
gatcacgaggtcaggagatc

SEQ ID NO: 6084 - DNA, 20 bp, Artificial Sequence
  Description of Artificial Sequence: Synthetic oligonucleotide
atcacgaggtcaggagatcg

SEQ ID NO: 6085 - DNA, 20 bp, Artificial Sequence
  Description of Artificial Sequence: Synthetic oligonucleotide
tcacgaggtcaggagatcga

SEQ ID NO: 6086 - DNA, 20 bp, Artificial Sequence
  Description of Artificial Sequence: Synthetic oligonucleotide
cacgaggtcaggagatcgag

SEQ ID NO: 6087 - DNA, 20 bp, Artificial Sequence
  Description of Artificial Sequence: Synthetic oligonucleotide
acgaggtcaggagatcgaga

SEQ ID NO: 6088 - DNA, 20 bp, Artificial Sequence
  Description of Artificial Sequence: Synthetic oligonucleotide
cgaggtcaggagatcgagac

SEQ ID NO: 6089 - DNA, 20 bp, Artificial Sequence
  Description of Artificial Sequence: Synthetic oligonucleotide
gaggtcaggagatcgagacc

SEQ ID NO: 6090 - DNA, 20 bp, Artificial Sequence
  Description of Artificial Sequence: Synthetic oligonucleotide
aggtcaggagatcgagacca

SEQ ID NO: 6091 - DNA, 20 bp, Artificial Sequence
  Description of Artificial Sequence: Synthetic oligonucleotide
ggtcaggagatcgagaccat

SEQ ID NO: 6092 - DNA, 20 bp, Artificial Sequence
  Description of Artificial Sequence: Synthetic oligonucleotide
gtcaggagatcgagaccatc

SEQ ID NO: 6093 - DNA, 20 bp, Artificial Sequence
  Description of Artificial Sequence: Synthetic oligonucleotide
tcaggagatcgagaccatcc

SEQ ID NO: 6094 - DNA, 20 bp, Artificial Sequence
  Description of Artificial Sequence: Synthetic oligonucleotide
caggagatcgagaccatcct

SEQ ID NO: 6095 - DNA, 20 bp, Artificial Sequence
  Description of Artificial Sequence: Synthetic oligonucleotide
aggagatcgagaccatcctg

SEQ ID NO: 6096 - DNA, 20 bp, Artificial Sequence
  Description of Artificial Sequence: Synthetic oligonucleotide
ggagatcgagaccatcctgg

SEQ ID NO: 6097 - DNA, 20 bp, Artificial Sequence
  Description of Artificial Sequence: Synthetic oligonucleotide
gagatcgagaccatcctggc

SEQ ID NO: 6098 - DNA, 20 bp, Artificial Sequence
  Description of Artificial Sequence: Synthetic oligonucleotide
agatcgagaccatcctggct

SEQ ID NO: 6099 - DNA, 20 bp, Artificial Sequence
  Description of Artificial Sequence: Synthetic oligonucleotide
gatcgagaccatcctggcta

SEQ ID NO: 6100 - DNA, 20 bp, Artificial Sequence
  Description of Artificial Sequence: Synthetic oligonucleotide
atcgagaccatcctggctaa

SEQ ID NO: 6101 - DNA, 20 bp, Artificial Sequence
  Description of Artificial Sequence: Synthetic oligonucleotide
tcgagaccatcctggctaac

SEQ ID NO: 6102 - DNA, 20 bp, Artificial Sequence
  Description of Artificial Sequence: Synthetic oligonucleotide
cgagaccatcctggctaaca

SEQ ID NO: 6103 - DNA, 20 bp, Artificial Sequence
  Description of Artificial Sequence: Synthetic oligonucleotide
gagaccatcctggctaacac

SEQ ID NO: 6104 - DNA, 20 bp, Artificial Sequence
  Description of Artificial Sequence: Synthetic oligonucleotide
agaccatcctggctaacacg

SEQ ID NO: 6105 - DNA, 20 bp, Artificial Sequence
  Description of Artificial Sequence: Synthetic oligonucleotide
gaccatcctggctaacacgg

SEQ ID NO: 6106 - DNA, 20 bp, Artificial Sequence
  Description of Artificial Sequence: Synthetic oligonucleotide
accatcctggctaacacggt

SEQ ID NO: 6107 - DNA, 20 bp, Artificial Sequence
  Description of Artificial Sequence: Synthetic oligonucleotide
ccatcctggctaacacggtg

SEQ ID NO: 6108 - DNA, 20 bp, Artificial Sequence
  Description of Artificial Sequence: Synthetic oligonucleotide
catcctggctaacacggtga

SEQ ID NO: 6109 - DNA, 20 bp, Artificial Sequence
  Description of Artificial Sequence: Synthetic oligonucleotide
atcctggctaacacggtgaa

SEQ ID NO: 6110 - DNA, 20 bp, Artificial Sequence
  Description of Artificial Sequence: Synthetic oligonucleotide
tcctggctaacacggtgaaa

SEQ ID NO: 6111 - DNA, 20 bp, Artificial Sequence
  Description of Artificial Sequence: Synthetic oligonucleotide
cctggctaacacggtgaaac

SEQ ID NO: 6112 - DNA, 20 bp, Artificial Sequence
  Description of Artificial Sequence: Synthetic oligonucleotide
ctggctaacacggtgaaacc

SEQ ID NO: 6113 - DNA, 20 bp, Artificial Sequence
  Description of Artificial Sequence: Synthetic oligonucleotide
tggctaacacggtgaaaccc

SEQ ID NO: 6114 - DNA, 20 bp, Artificial Sequence
  Description of Artificial Sequence: Synthetic oligonucleotide
ggctaacacggtgaaacccc

SEQ ID NO: 6115 - DNA, 20 bp, Artificial Sequence
  Description of Artificial Sequence: Synthetic oligonucleotide
gctaacacggtgaaacccca

SEQ ID NO: 6116 - DNA, 20 bp, Artificial Sequence
  Description of Artificial Sequence: Synthetic oligonucleotide
ctaacacggtgaaaccccat

SEQ ID NO: 6117 - DNA, 20 bp, Artificial Sequence
  Description of Artificial Sequence: Synthetic oligonucleotide
taacacggtgaaaccccatc

SEQ ID NO: 6118 - DNA, 20 bp, Artificial Sequence
  Description of Artificial Sequence: Synthetic oligonucleotide
aacacggtgaaaccccatct

SEQ ID NO: 6119 - DNA, 20 bp, Artificial Sequence
  Description of Artificial Sequence: Synthetic oligonucleotide
acacggtgaaaccccatctc

SEQ ID NO: 6120 - DNA, 20 bp, Artificial Sequence
  Description of Artificial Sequence: Synthetic oligonucleotide
cacggtgaaaccccatctct

SEQ ID NO: 6121 - DNA, 20 bp, Artificial Sequence
  Description of Artificial Sequence: Synthetic oligonucleotide
acggtgaaaccccatctcta

SEQ ID NO: 6122 - DNA, 20 bp, Artificial Sequence
  Description of Artificial Sequence: Synthetic oligonucleotide
cggtgaaaccccatctctac

SEQ ID NO: 6123 - DNA, 20 bp, Artificial Sequence
  Description of Artificial Sequence: Synthetic oligonucleotide
ggtgaaaccccatctctact

SEQ ID NO: 6124 - DNA, 20 bp, Artificial Sequence
  Description of Artificial Sequence: Synthetic oligonucleotide
gtgaaaccccatctctacta

SEQ ID NO: 6125 - DNA, 20 bp, Artificial Sequence
  Description of Artificial Sequence: Synthetic oligonucleotide
tgaaaccccatctctactaa

SEQ ID NO: 6126 - DNA, 20 bp, Artificial Sequence
  Description of Artificial Sequence: Synthetic oligonucleotide
gaaaccccatctctactaaa

SEQ ID NO: 6127 - DNA, 20 bp, Artificial Sequence
  Description of Artificial Sequence: Synthetic oligonucleotide
aaaccccatctctactaaaa

SEQ ID NO: 6128 - DNA, 20 bp, Artificial Sequence
  Description of Artificial Sequence: Synthetic oligonucleotide
aaccccatctctactaaaaa

SEQ ID NO: 6129 - DNA, 20 bp, Artificial Sequence
  Description of Artificial Sequence: Synthetic oligonucleotide
accccatctctactaaaaat

SEQ ID NO: 6130 - DNA, 20 bp, Artificial Sequence
  Description of Artificial Sequence: Synthetic oligonucleotide
ccccatctctactaaaaata

SEQ ID NO: 6131 - DNA, 20 bp, Artificial Sequence
  Description of Artificial Sequence: Synthetic oligonucleotide
cccatctctactaaaaatac

SEQ ID NO: 6132 - DNA, 20 bp, Artificial Sequence
  Description of Artificial Sequence: Synthetic oligonucleotide
ccatctctactaaaaataca

SEQ ID NO: 6133 - DNA, 20 bp, Artificial Sequence
  Description of Artificial Sequence: Synthetic oligonucleotide
catctctactaaaaatacaa

SEQ ID NO: 6134 - DNA, 20 bp, Artificial Sequence
  Description of Artificial Sequence: Synthetic oligonucleotide
atctctactaaaaatacaaa

SEQ ID NO: 6135 - DNA, 20 bp, Artificial Sequence
  Description of Artificial Sequence: Synthetic oligonucleotide
tctctactaaaaatacaaaa

SEQ ID NO: 6136 - DNA, 20 bp, Artificial Sequence
  Description of Artificial Sequence: Synthetic oligonucleotide
ctctactaaaaatacaaaaa

SEQ ID NO: 6137 - DNA, 20 bp, Artificial Sequence
  Description of Artificial Sequence: Synthetic oligonucleotide
tctactaaaaatacaaaaaa

SEQ ID NO: 6138 - DNA, 20 bp, Artificial Sequence
  Description of Artificial Sequence: Synthetic oligonucleotide
ctactaaaaatacaaaaaaa

SEQ ID NO: 6139 - DNA, 20 bp, Artificial Sequence
  Description of Artificial Sequence: Synthetic oligonucleotide
tactaaaaatacaaaaaaat

SEQ ID NO: 6140 - DNA, 20 bp, Artificial Sequence
  Description of Artificial Sequence: Synthetic oligonucleotide
actaaaaatacaaaaaaatt

SEQ ID NO: 6141 - DNA, 20 bp, Artificial Sequence
  Description of Artificial Sequence: Synthetic oligonucleotide
ctaaaaatacaaaaaaatta

SEQ ID NO: 6142 - DNA, 20 bp, Artificial Sequence
  Description of Artificial Sequence: Synthetic oligonucleotide
taaaaatacaaaaaaattag

SEQ ID NO: 6143 - DNA, 20 bp, Artificial Sequence
  Description of Artificial Sequence: Synthetic oligonucleotide
aaaaatacaaaaaaattagc

SEQ ID NO: 6144 - DNA, 20 bp, Artificial Sequence
  Description of Artificial Sequence: Synthetic oligonucleotide
aaaatacaaaaaaattagcc

SEQ ID NO: 6145 - DNA, 20 bp, Artificial Sequence
  Description of Artificial Sequence: Synthetic oligonucleotide
aaatacaaaaaaattagcca

SEQ ID NO: 6146 - DNA, 20 bp, Artificial Sequence
  Description of Artificial Sequence: Synthetic oligonucleotide
aatacaaaaaaattagccag

SEQ ID NO: 6147 - DNA, 20 bp, Artificial Sequence
  Description of Artificial Sequence: Synthetic oligonucleotide
atacaaaaaaattagccagg

SEQ ID NO: 6148 - DNA, 20 bp, Artificial Sequence
  Description of Artificial Sequence: Synthetic oligonucleotide
tacaaaaaaattagccaggc

SEQ ID NO: 6149 - DNA, 20 bp, Artificial Sequence
  Description of Artificial Sequence: Synthetic oligonucleotide
acaaaaaaattagccaggcg

SEQ ID NO: 6150 - DNA, 20 bp, Artificial Sequence
  Description of Artificial Sequence: Synthetic oligonucleotide
caaaaaaattagccaggcgt

SEQ ID NO: 6151 - DNA, 20 bp, Artificial Sequence
  Description of Artificial Sequence: Synthetic oligonucleotide
aaaaaaattagccaggcgtg

SEQ ID NO: 6152 - DNA, 20 bp, Artificial Sequence
  Description of Artificial Sequence: Synthetic oligonucleotide
aaaaaattagccaggcgtgg

SEQ ID NO: 6153 - DNA, 20 bp, Artificial Sequence
  Description of Artificial Sequence: Synthetic oligonucleotide
aaaaattagccaggcgtggt

SEQ ID NO: 6154 - DNA, 20 bp, Artificial Sequence
  Description of Artificial Sequence: Synthetic oligonucleotide
aaaattagccaggcgtggtg

SEQ ID NO: 6155 - DNA, 20 bp, Artificial Sequence
  Description of Artificial Sequence: Synthetic oligonucleotide
aaattagccaggcgtggtgg

SEQ ID NO: 6156 - DNA, 20 bp, Artificial Sequence
  Description of Artificial Sequence: Synthetic oligonucleotide
aattagccaggcgtggtggt

SEQ ID NO: 6157 - DNA, 20 bp, Artificial Sequence
  Description of Artificial Sequence: Synthetic oligonucleotide
attagccaggcgtggtggtg

SEQ ID NO: 6158 - DNA, 20 bp, Artificial Sequence
  Description of Artificial Sequence: Synthetic oligonucleotide
ttagccaggcgtggtggtgg

SEQ ID NO: 6159 - DNA, 20 bp, Artificial Sequence
  Description of Artificial Sequence: Synthetic oligonucleotide
tagccaggcgtggtggtggg

SEQ ID NO: 6160 - DNA, 20 bp, Artificial Sequence
  Description of Artificial Sequence: Synthetic oligonucleotide
agccaggcgtggtggtgggc

SEQ ID NO: 6161 - DNA, 20 bp, Artificial Sequence
  Description of Artificial Sequence: Synthetic oligonucleotide
gccaggcgtggtggtgggca

SEQ ID NO: 6162 - DNA, 20 bp, Artificial Sequence
  Description of Artificial Sequence: Synthetic oligonucleotide
ccaggcgtggtggtgggcac

SEQ ID NO: 6163 - DNA, 20 bp, Artificial Sequence
  Description of Artificial Sequence: Synthetic oligonucleotide
caggcgtggtggtgggcacc

SEQ ID NO: 6164 - DNA, 20 bp, Artificial Sequence
  Description of Artificial Sequence: Synthetic oligonucleotide
aggcgtggtggtgggcacct

SEQ ID NO: 6165 - DNA, 20 bp, Artificial Sequence
  Description of Artificial Sequence: Synthetic oligonucleotide
ggcgtggtggtgggcaccta

SEQ ID NO: 6166 - DNA, 20 bp, Artificial Sequence
  Description of Artificial Sequence: Synthetic oligonucleotide
gcgtggtggtgggcacctat

SEQ ID NO: 6167 - DNA, 20 bp, Artificial Sequence
  Description of Artificial Sequence: Synthetic oligonucleotide
cgtggtggtgggcacctata

SEQ ID NO: 6168 - DNA, 20 bp, Artificial Sequence
  Description of Artificial Sequence: Synthetic oligonucleotide
gtggtggtgggcacctatag

SEQ ID NO: 6169 - DNA, 20 bp, Artificial Sequence
  Description of Artificial Sequence: Synthetic oligonucleotide
tggtggtgggcacctatagt

SEQ ID NO: 6170 - DNA, 20 bp, Artificial Sequence
  Description of Artificial Sequence: Synthetic oligonucleotide
ggtggtgggcacctatagtc

SEQ ID NO: 6171 - DNA, 20 bp, Artificial Sequence
  Description of Artificial Sequence: Synthetic oligonucleotide
gtggtgggcacctatagtcc

SEQ ID NO: 6172 - DNA, 20 bp, Artificial Sequence
  Description of Artificial Sequence: Synthetic oligonucleotide
tggtgggcacctatagtccc

SEQ ID NO: 6173 - DNA, 20 bp, Artificial Sequence
  Description of Artificial Sequence: Synthetic oligonucleotide
ggtgggcacctatagtccca

SEQ ID NO: 6174 - DNA, 20 bp, Artificial Sequence
  Description of Artificial Sequence: Synthetic oligonucleotide
gtgggcacctatagtcccag

SEQ ID NO: 6175 - DNA, 20 bp, Artificial Sequence
  Description of Artificial Sequence: Synthetic oligonucleotide
tgggcacctatagtcccagc

SEQ ID NO: 6176 - DNA, 20 bp, Artificial Sequence
  Description of Artificial Sequence: Synthetic oligonucleotide
gggcacctatagtcccagct

SEQ ID NO: 6177 - DNA, 20 bp, Artificial Sequence
  Description of Artificial Sequence: Synthetic oligonucleotide
ggcacctatagtcccagcta

SEQ ID NO: 6178 - DNA, 20 bp, Artificial Sequence
  Description of Artificial Sequence: Synthetic oligonucleotide
gcacctatagtcccagctac

SEQ ID NO: 6179 - DNA, 20 bp, Artificial Sequence
  Description of Artificial Sequence: Synthetic oligonucleotide
cacctatagtcccagctact

SEQ ID NO: 6180 - DNA, 20 bp, Artificial Sequence
  Description of Artificial Sequence: Synthetic oligonucleotide
acctatagtcccagctactc

SEQ ID NO: 6181 - DNA, 20 bp, Artificial Sequence
  Description of Artificial Sequence: Synthetic oligonucleotide
cctatagtcccagctactcg

SEQ ID NO: 6182 - DNA, 20 bp, Artificial Sequence
  Description of Artificial Sequence: Synthetic oligonucleotide
ctatagtcccagctactcgg

SEQ ID NO: 6183 - DNA, 20 bp, Artificial Sequence
  Description of Artificial Sequence: Synthetic oligonucleotide
tatagtcccagctactcggg

SEQ ID NO: 6184 - DNA, 20 bp, Artificial Sequence
  Description of Artificial Sequence: Synthetic oligonucleotide
atagtcccagctactcggga

SEQ ID NO: 6185 - DNA, 20 bp, Artificial Sequence
  Description of Artificial Sequence: Synthetic oligonucleotide
tagtcccagctactcgggag

SEQ ID NO: 6186 - DNA, 20 bp, Artificial Sequence
  Description of Artificial Sequence: Synthetic oligonucleotide
agtcccagctactcgggagg

SEQ ID NO: 6187 - DNA, 20 bp, Artificial Sequence
  Description of Artificial Sequence: Synthetic oligonucleotide
gtcccagctactcgggaggc

SEQ ID NO: 6188 - DNA, 20 bp, Artificial Sequence
  Description of Artificial Sequence: Synthetic oligonucleotide
tcccagctactcgggaggct

SEQ ID NO: 6189 - DNA, 20 bp, Artificial Sequence
  Description of Artificial Sequence: Synthetic oligonucleotide
cccagctactcgggaggctg

SEQ ID NO: 6190 - DNA, 20 bp, Artificial Sequence
  Description of Artificial Sequence: Synthetic oligonucleotide
ccagctactcgggaggctga

SEQ ID NO: 6191 - DNA, 20 bp, Artificial Sequence
  Description of Artificial Sequence: Synthetic oligonucleotide
cagctactcgggaggctgag

SEQ ID NO: 6192 - DNA, 20 bp, Artificial Sequence
  Description of Artificial Sequence: Synthetic oligonucleotide
agctactcgggaggctgagg

SEQ ID NO: 6193 - DNA, 20 bp, Artificial Sequence
  Description of Artificial Sequence: Synthetic oligonucleotide
gctactcgggaggctgaggc

SEQ ID NO: 6194 - DNA, 20 bp, Artificial Sequence
  Description of Artificial Sequence: Synthetic oligonucleotide
ctactcgggaggctgaggca

SEQ ID NO: 6195 - DNA, 20 bp, Artificial Sequence
  Description of Artificial Sequence: Synthetic oligonucleotide
tactcgggaggctgaggcag

SEQ ID NO: 6196 - DNA, 20 bp, Artificial Sequence
  Description of Artificial Sequence: Synthetic oligonucleotide
actcgggaggctgaggcagg

SEQ ID NO: 6197 - DNA, 20 bp, Artificial Sequence
  Description of Artificial Sequence: Synthetic oligonucleotide
ctcgggaggctgaggcagga

SEQ ID NO: 6198 - DNA, 20 bp, Artificial Sequence
  Description of Artificial Sequence: Synthetic oligonucleotide
tcgggaggctgaggcaggag

SEQ ID NO: 6199 - DNA, 20 bp, Artificial Sequence
  Description of Artificial Sequence: Synthetic oligonucleotide
cgggaggctgaggcaggaga

SEQ ID NO: 6200 - DNA, 20 bp, Artificial Sequence
  Description of Artificial Sequence: Synthetic oligonucleotide
gggaggctgaggcaggagaa

SEQ ID NO: 6201 - DNA, 20 bp, Artificial Sequence
  Description of Artificial Sequence: Synthetic oligonucleotide
ggaggctgaggcaggagaat

SEQ ID NO: 6202 - DNA, 20 bp, Artificial Sequence
  Description of Artificial Sequence: Synthetic oligonucleotide
gaggctgaggcaggagaatg

SEQ ID NO: 6203 - DNA, 20 bp, Artificial Sequence
  Description of Artificial Sequence: Synthetic oligonucleotide
aggctgaggcaggagaatgg

SEQ ID NO: 6204 - DNA, 20 bp, Artificial Sequence
  Description of Artificial Sequence: Synthetic oligonucleotide
ggctgaggcaggagaatggt

SEQ ID NO: 6205 - DNA, 20 bp, Artificial Sequence
  Description of Artificial Sequence: Synthetic oligonucleotide
gctgaggcaggagaatggtg

SEQ ID NO: 6206 - DNA, 20 bp, Artificial Sequence
  Description of Artificial Sequence: Synthetic oligonucleotide
ctgaggcaggagaatggtgt

SEQ ID NO: 6207 - DNA, 20 bp, Artificial Sequence
  Description of Artificial Sequence: Synthetic oligonucleotide
tgaggcaggagaatggtgtg

SEQ ID NO: 6208 - DNA, 20 bp, Artificial Sequence
  Description of Artificial Sequence: Synthetic oligonucleotide
gaggcaggagaatggtgtga

SEQ ID NO: 6209 - DNA, 20 bp, Artificial Sequence
  Description of Artificial Sequence: Synthetic oligonucleotide
aggcaggagaatggtgtgaa

SEQ ID NO: 6210 - DNA, 20 bp, Artificial Sequence
  Description of Artificial Sequence: Synthetic oligonucleotide
ggcaggagaatggtgtgaac

SEQ ID NO: 6211 - DNA, 20 bp, Artificial Sequence
  Description of Artificial Sequence: Synthetic oligonucleotide
gcaggagaatggtgtgaact

SEQ ID NO: 6212 - DNA, 20 bp, Artificial Sequence
  Description of Artificial Sequence: Synthetic oligonucleotide
caggagaatggtgtgaactc

SEQ ID NO: 6213 - DNA, 20 bp, Artificial Sequence
  Description of Artificial Sequence: Synthetic oligonucleotide
aggagaatggtgtgaactca

SEQ ID NO: 6214 - DNA, 20 bp, Artificial Sequence
  Description of Artificial Sequence: Synthetic oligonucleotide
ggagaatggtgtgaactcag

SEQ ID NO: 6215 - DNA, 20 bp, Artificial Sequence
  Description of Artificial Sequence: Synthetic oligonucleotide
gagaatggtgtgaactcagg

SEQ ID NO: 6216 - DNA, 20 bp, Artificial Sequence
  Description of Artificial Sequence: Synthetic oligonucleotide
agaatggtgtgaactcagga

SEQ ID NO: 6217 - DNA, 20 bp, Artificial Sequence
  Description of Artificial Sequence: Synthetic oligonucleotide
gaatggtgtgaactcaggag

SEQ ID NO: 6218 - DNA, 20 bp, Artificial Sequence
  Description of Artificial Sequence: Synthetic oligonucleotide
aatggtgtgaactcaggagg

SEQ ID NO: 6219 - DNA, 20 bp, Artificial Sequence
  Description of Artificial Sequence: Synthetic oligonucleotide
atggtgtgaactcaggaggt

SEQ ID NO: 6220 - DNA, 20 bp, Artificial Sequence
  Description of Artificial Sequence: Synthetic oligonucleotide
tggtgtgaactcaggaggtg

SEQ ID NO: 6221 - DNA, 20 bp, Artificial Sequence
  Description of Artificial Sequence: Synthetic oligonucleotide
ggtgtgaactcaggaggtgg

SEQ ID NO: 6222 - DNA, 20 bp, Artificial Sequence
  Description of Artificial Sequence: Synthetic oligonucleotide
gtgtgaactcaggaggtgga

SEQ ID NO: 6223 - DNA, 20 bp, Artificial Sequence
  Description of Artificial Sequence: Synthetic oligonucleotide
tgtgaactcaggaggtggag

SEQ ID NO: 6224 - DNA, 20 bp, Artificial Sequence
  Description of Artificial Sequence: Synthetic oligonucleotide
gtgaactcaggaggtggagc

SEQ ID NO: 6225 - DNA, 20 bp, Artificial Sequence
  Description of Artificial Sequence: Synthetic oligonucleotide
tgaactcaggaggtggagct

SEQ ID NO: 6226 - DNA, 20 bp, Artificial Sequence
  Description of Artificial Sequence: Synthetic oligonucleotide
gaactcaggaggtggagctt

SEQ ID NO: 6227 - DNA, 20 bp, Artificial Sequence
  Description of Artificial Sequence: Synthetic oligonucleotide
aactcaggaggtggagcttg

SEQ ID NO: 6228 - DNA, 20 bp, Artificial Sequence
  Description of Artificial Sequence: Synthetic oligonucleotide
actcaggaggtggagcttgc

SEQ ID NO: 6229 - DNA, 20 bp, Artificial Sequence
  Description of Artificial Sequence: Synthetic oligonucleotide
ctcaggaggtggagcttgca

SEQ ID NO: 6230 - DNA, 20 bp, Artificial Sequence
  Description of Artificial Sequence: Synthetic oligonucleotide
tcaggaggtggagcttgcag

SEQ ID NO: 6231 - DNA, 20 bp, Artificial Sequence
  Description of Artificial Sequence: Synthetic oligonucleotide
caggaggtggagcttgcagt

SEQ ID NO: 6232 - DNA, 20 bp, Artificial Sequence
  Description of Artificial Sequence: Synthetic oligonucleotide
aggaggtggagcttgcagtg

SEQ ID NO: 6233 - DNA, 20 bp, Artificial Sequence
  Description of Artificial Sequence: Synthetic oligonucleotide
ggaggtggagcttgcagtga

SEQ ID NO: 6234 - DNA, 20 bp, Artificial Sequence
  Description of Artificial Sequence: Synthetic oligonucleotide
gaggtggagcttgcagtgag

SEQ ID NO: 6235 - DNA, 20 bp, Artificial Sequence
  Description of Artificial Sequence: Synthetic oligonucleotide
aggtggagcttgcagtgagc

SEQ ID NO: 6236 - DNA, 20 bp, Artificial Sequence
  Description of Artificial Sequence: Synthetic oligonucleotide
ggtggagcttgcagtgagcc

SEQ ID NO: 6237 - DNA, 20 bp, Artificial Sequence
  Description of Artificial Sequence: Synthetic oligonucleotide
gtggagcttgcagtgagcca

SEQ ID NO: 6238 - DNA, 20 bp, Artificial Sequence
  Description of Artificial Sequence: Synthetic oligonucleotide
tggagcttgcagtgagccaa

SEQ ID NO: 6239 - DNA, 20 bp, Artificial Sequence
  Description of Artificial Sequence: Synthetic oligonucleotide
ggagcttgcagtgagccaag

SEQ ID NO: 6240 - DNA, 20 bp, Artificial Sequence
  Description of Artificial Sequence: Synthetic oligonucleotide
gagcttgcagtgagccaaga

SEQ ID NO: 6241 - DNA, 20 bp, Artificial Sequence
  Description of Artificial Sequence: Synthetic oligonucleotide
agcttgcagtgagccaagat

SEQ ID NO: 6242 - DNA, 20 bp, Artificial Sequence
  Description of Artificial Sequence: Synthetic oligonucleotide
gcttgcagtgagccaagatc

SEQ ID NO: 6243 - DNA, 20 bp, Artificial Sequence
  Description of Artificial Sequence: Synthetic oligonucleotide
cttgcagtgagccaagatcg

SEQ ID NO: 6244 - DNA, 20 bp, Artificial Sequence
  Description of Artificial Sequence: Synthetic oligonucleotide
ttgcagtgagccaagatcgt

SEQ ID NO: 6245 - DNA, 20 bp, Artificial Sequence
  Description of Artificial Sequence: Synthetic oligonucleotide
tgcagtgagccaagatcgtg

SEQ ID NO: 6246 - DNA, 20 bp, Artificial Sequence
  Description of Artificial Sequence: Synthetic oligonucleotide
gcagtgagccaagatcgtgc

SEQ ID NO: 6247 - DNA, 20 bp, Artificial Sequence
  Description of Artificial Sequence: Synthetic oligonucleotide
cagtgagccaagatcgtgcc

SEQ ID NO: 6248 - DNA, 20 bp, Artificial Sequence
  Description of Artificial Sequence: Synthetic oligonucleotide
agtgagccaagatcgtgcca

SEQ ID NO: 6249 - DNA, 20 bp, Artificial Sequence
  Description of Artificial Sequence: Synthetic oligonucleotide
gtgagccaagatcgtgccac

SEQ ID NO: 6250 - DNA, 20 bp, Artificial Sequence
  Description of Artificial Sequence: Synthetic oligonucleotide
tgagccaagatcgtgccaca

SEQ ID NO: 6251 - DNA, 20 bp, Artificial Sequence
  Description of Artificial Sequence: Synthetic oligonucleotide
gagccaagatcgtgccacaa

SEQ ID NO: 6252 - DNA, 20 bp, Artificial Sequence
  Description of Artificial Sequence: Synthetic oligonucleotide
agccaagatcgtgccacaaa

SEQ ID NO: 6253 - DNA, 20 bp, Artificial Sequence
  Description of Artificial Sequence: Synthetic oligonucleotide
gccaagatcgtgccacaaag

SEQ ID NO: 6254 - DNA, 20 bp, Artificial Sequence
  Description of Artificial Sequence: Synthetic oligonucleotide
ccaagatcgtgccacaaagc

SEQ ID NO: 6255 - DNA, 20 bp, Artificial Sequence
  Description of Artificial Sequence: Synthetic oligonucleotide
caagatcgtgccacaaagca

SEQ ID NO: 6256 - DNA, 20 bp, Artificial Sequence
  Description of Artificial Sequence: Synthetic oligonucleotide
aagatcgtgccacaaagcac

SEQ ID NO: 6257 - DNA, 20 bp, Artificial Sequence
  Description of Artificial Sequence: Synthetic oligonucleotide
agatcgtgccacaaagcact

SEQ ID NO: 6258 - DNA, 20 bp, Artificial Sequence
  Description of Artificial Sequence: Synthetic oligonucleotide
gatcgtgccacaaagcactc

SEQ ID NO: 6259 - DNA, 20 bp, Artificial Sequence
  Description of Artificial Sequence: Synthetic oligonucleotide
atcgtgccacaaagcactcc

SEQ ID NO: 6260 - DNA, 20 bp, Artificial Sequence
  Description of Artificial Sequence: Synthetic oligonucleotide
tcgtgccacaaagcactcca

SEQ ID NO: 6261 - DNA, 20 bp, Artificial Sequence
  Description of Artificial Sequence: Synthetic oligonucleotide
cgtgccacaaagcactccag

SEQ ID NO: 6262 - DNA, 20 bp, Artificial Sequence
  Description of Artificial Sequence: Synthetic oligonucleotide
gtgccacaaagcactccagc

SEQ ID NO: 6263 - DNA, 20 bp, Artificial Sequence
  Description of Artificial Sequence: Synthetic oligonucleotide
tgccacaaagcactccagcc

SEQ ID NO: 6264 - DNA, 20 bp, Artificial Sequence
  Description of Artificial Sequence: Synthetic oligonucleotide
gccacaaagcactccagcct

SEQ ID NO: 6265 - DNA, 20 bp, Artificial Sequence
  Description of Artificial Sequence: Synthetic oligonucleotide
ccacaaagcactccagcctg

SEQ ID NO: 6266 - DNA, 20 bp, Artificial Sequence
  Description of Artificial Sequence: Synthetic oligonucleotide
cacaaagcactccagcctgg

SEQ ID NO: 6267 - DNA, 20 bp, Artificial Sequence
  Description of Artificial Sequence: Synthetic oligonucleotide
acaaagcactccagcctggg

SEQ ID NO: 6268 - DNA, 20 bp, Artificial Sequence
  Description of Artificial Sequence: Synthetic oligonucleotide
caaagcactccagcctgggt

SEQ ID NO: 6269 - DNA, 20 bp, Artificial Sequence
  Description of Artificial Sequence: Synthetic oligonucleotide
aaagcactccagcctgggtg

SEQ ID NO: 6270 - DNA, 20 bp, Artificial Sequence
  Description of Artificial Sequence: Synthetic oligonucleotide
aagcactccagcctgggtga

SEQ ID NO: 6271 - DNA, 20 bp, Artificial Sequence
  Description of Artificial Sequence: Synthetic oligonucleotide
agcactccagcctgggtgac

SEQ ID NO: 6272 - DNA, 20 bp, Artificial Sequence
  Description of Artificial Sequence: Synthetic oligonucleotide
gcactccagcctgggtgaca

SEQ ID NO: 6273 - DNA, 20 bp, Artificial Sequence
  Description of Artificial Sequence: Synthetic oligonucleotide
cactccagcctgggtgacaa

SEQ ID NO: 6274 - DNA, 20 bp, Artificial Sequence
  Description of Artificial Sequence: Synthetic oligonucleotide
actccagcctgggtgacaaa

SEQ ID NO: 6275 - DNA, 20 bp, Artificial Sequence
  Description of Artificial Sequence: Synthetic oligonucleotide
ctccagcctgggtgacaaag

SEQ ID NO: 6276 - DNA, 20 bp, Artificial Sequence
  Description of Artificial Sequence: Synthetic oligonucleotide
tccagcctgggtgacaaagt

SEQ ID NO: 6277 - DNA, 20 bp, Artificial Sequence
  Description of Artificial Sequence: Synthetic oligonucleotide
ccagcctgggtgacaaagtg

SEQ ID NO: 6278 - DNA, 20 bp, Artificial Sequence
  Description of Artificial Sequence: Synthetic oligonucleotide
cagcctgggtgacaaagtga

SEQ ID NO: 6279 - DNA, 20 bp, Artificial Sequence
  Description of Artificial Sequence: Synthetic oligonucleotide
agcctgggtgacaaagtgag

SEQ ID NO: 6280 - DNA, 20 bp, Artificial Sequence
  Description of Artificial Sequence: Synthetic oligonucleotide
gcctgggtgacaaagtgaga

SEQ ID NO: 6281 - DNA, 20 bp, Artificial Sequence
  Description of Artificial Sequence: Synthetic oligonucleotide
cctgggtgacaaagtgagac

SEQ ID NO: 6282 - DNA, 20 bp, Artificial Sequence
  Description of Artificial Sequence: Synthetic oligonucleotide
ctgggtgacaaagtgagact

SEQ ID NO: 6283 - DNA, 20 bp, Artificial Sequence
  Description of Artificial Sequence: Synthetic oligonucleotide
tgggtgacaaagtgagactc

SEQ ID NO: 6284 - DNA, 20 bp, Artificial Sequence
  Description of Artificial Sequence: Synthetic oligonucleotide
gggtgacaaagtgagactcc

SEQ ID NO: 6285 - DNA, 20 bp, Artificial Sequence
  Description of Artificial Sequence: Synthetic oligonucleotide
ggtgacaaagtgagactccg

SEQ ID NO: 6286 - DNA, 20 bp, Artificial Sequence
  Description of Artificial Sequence: Synthetic oligonucleotide
gtgacaaagtgagactccgt

SEQ ID NO: 6287 - DNA, 20 bp, Artificial Sequence
  Description of Artificial Sequence: Synthetic oligonucleotide
tgacaaagtgagactccgtc

SEQ ID NO: 6288 - DNA, 20 bp, Artificial Sequence
  Description of Artificial Sequence: Synthetic oligonucleotide
gacaaagtgagactccgtct

SEQ ID NO: 6289 - DNA, 20 bp, Artificial Sequence
  Description of Artificial Sequence: Synthetic oligonucleotide
acaaagtgagactccgtctc

SEQ ID NO: 6290 - DNA, 20 bp, Artificial Sequence
  Description of Artificial Sequence: Synthetic oligonucleotide
caaagtgagactccgtctca

SEQ ID NO: 6291 - DNA, 20 bp, Artificial Sequence
  Description of Artificial Sequence: Synthetic oligonucleotide
aaagtgagactccgtctcaa

SEQ ID NO: 6292 - DNA, 20 bp, Artificial Sequence
  Description of Artificial Sequence: Synthetic oligonucleotide
aagtgagactccgtctcaaa

SEQ ID NO: 6293 - DNA, 20 bp, Artificial Sequence
  Description of Artificial Sequence: Synthetic oligonucleotide
agtgagactccgtctcaaaa

SEQ ID NO: 6294 - DNA, 20 bp, Artificial Sequence
  Description of Artificial Sequence: Synthetic oligonucleotide
gtgagactccgtctcaaaaa

SEQ ID NO: 6295 - DNA, 20 bp, Artificial Sequence
  Description of Artificial Sequence: Synthetic oligonucleotide
tgagactccgtctcaaaaaa

SEQ ID NO: 6296 - DNA, 20 bp, Artificial Sequence
  Description of Artificial Sequence: Synthetic oligonucleotide
gagactccgtctcaaaaaat

SEQ ID NO: 6297 - DNA, 20 bp, Artificial Sequence
  Description of Artificial Sequence: Synthetic oligonucleotide
agactccgtctcaaaaaata

SEQ ID NO: 6298 - DNA, 20 bp, Artificial Sequence
  Description of Artificial Sequence: Synthetic oligonucleotide
gactccgtctcaaaaaataa

SEQ ID NO: 6299 - DNA, 20 bp, Artificial Sequence
  Description of Artificial Sequence: Synthetic oligonucleotide
actccgtctcaaaaaataaa

SEQ ID NO: 6300 - DNA, 20 bp, Artificial Sequence
  Description of Artificial Sequence: Synthetic oligonucleotide
ctccgtctcaaaaaataaat

SEQ ID NO: 6301 - DNA, 20 bp, Artificial Sequence
  Description of Artificial Sequence: Synthetic oligonucleotide
tccgtctcaaaaaataaata

SEQ ID NO: 6302 - DNA, 20 bp, Artificial Sequence
  Description of Artificial Sequence: Synthetic oligonucleotide
ccgtctcaaaaaataaatac

SEQ ID NO: 6303 - DNA, 20 bp, Artificial Sequence
  Description of Artificial Sequence: Synthetic oligonucleotide
cgtctcaaaaaataaataca

SEQ ID NO: 6304 - DNA, 20 bp, Artificial Sequence
  Description of Artificial Sequence: Synthetic oligonucleotide
gtctcaaaaaataaatacat

SEQ ID NO: 6305 - DNA, 20 bp, Artificial Sequence
  Description of Artificial Sequence: Synthetic oligonucleotide
tctcaaaaaataaatacata

SEQ ID NO: 6306 - DNA, 20 bp, Artificial Sequence
  Description of Artificial Sequence: Synthetic oligonucleotide
ctcaaaaaataaatacataa

SEQ ID NO: 6307 - DNA, 20 bp, Artificial Sequence
  Description of Artificial Sequence: Synthetic oligonucleotide
tcaaaaaataaatacataaa

SEQ ID NO: 6308 - DNA, 20 bp, Artificial Sequence
  Description of Artificial Sequence: Synthetic oligonucleotide
caaaaaataaatacataaat

SEQ ID NO: 6309 - DNA, 20 bp, Artificial Sequence
  Description of Artificial Sequence: Synthetic oligonucleotide
aaaaaataaatacataaata

SEQ ID NO: 6310 - DNA, 20 bp, Artificial Sequence
  Description of Artificial Sequence: Synthetic oligonucleotide
aaaaataaatacataaataa

SEQ ID NO: 6311 - DNA, 20 bp, Artificial Sequence
  Description of Artificial Sequence: Synthetic oligonucleotide
aaaataaatacataaataaa

SEQ ID NO: 6312 - DNA, 20 bp, Artificial Sequence
  Description of Artificial Sequence: Synthetic oligonucleotide
aaataaatacataaataaat

SEQ ID NO: 6313 - DNA, 20 bp, Artificial Sequence
  Description of Artificial Sequence: Synthetic oligonucleotide
aataaatacataaataaata

SEQ ID NO: 6314 - DNA, 20 bp, Artificial Sequence
  Description of Artificial Sequence: Synthetic oligonucleotide
ataaatacataaataaataa

SEQ ID NO: 6315 - DNA, 20 bp, Artificial Sequence
  Description of Artificial Sequence: Synthetic oligonucleotide
taaatacataaataaataaa

SEQ ID NO: 6316 - DNA, 20 bp, Artificial Sequence
  Description of Artificial Sequence: Synthetic oligonucleotide
aaatacataaataaataaat

SEQ ID NO: 6317 - DNA, 20 bp, Artificial Sequence
  Description of Artificial Sequence: Synthetic oligonucleotide
aatacataaataaataaata

SEQ ID NO: 6318 - DNA, 20 bp, Artificial Sequence
  Description of Artificial Sequence: Synthetic oligonucleotide
atacataaataaataaataa

SEQ ID NO: 6319 - DNA, 20 bp, Artificial Sequence
  Description of Artificial Sequence: Synthetic oligonucleotide
tacataaataaataaataaa

SEQ ID NO: 6320 - DNA, 20 bp, Artificial Sequence
  Description of Artificial Sequence: Synthetic oligonucleotide
acataaataaataaataaac

SEQ ID NO: 6321 - DNA, 20 bp, Artificial Sequence
  Description of Artificial Sequence: Synthetic oligonucleotide
cataaataaataaataaaca

SEQ ID NO: 6322 - DNA, 20 bp, Artificial Sequence
  Description of Artificial Sequence: Synthetic oligonucleotide
ataaataaataaataaacaa

SEQ ID NO: 6323 - DNA, 20 bp, Artificial Sequence
  Description of Artificial Sequence: Synthetic oligonucleotide
taaataaataaataaacaaa

SEQ ID NO: 6324 - DNA, 20 bp, Artificial Sequence
  Description of Artificial Sequence: Synthetic oligonucleotide
aaataaataaataaacaaac

SEQ ID NO: 6325 - DNA, 20 bp, Artificial Sequence
  Description of Artificial Sequence: Synthetic oligonucleotide
aataaataaataaacaaaca

SEQ ID NO: 6326 - DNA, 20 bp, Artificial Sequence
  Description of Artificial Sequence: Synthetic oligonucleotide
ataaataaataaacaaacac

SEQ ID NO: 6327 - DNA, 20 bp, Artificial Sequence
  Description of Artificial Sequence: Synthetic oligonucleotide
taaataaataaacaaacaca

SEQ ID NO: 6328 - DNA, 20 bp, Artificial Sequence
  Description of Artificial Sequence: Synthetic oligonucleotide
aaataaataaacaaacacat

SEQ ID NO: 6329 - DNA, 20 bp, Artificial Sequence
  Description of Artificial Sequence: Synthetic oligonucleotide
aataaataaacaaacacata

SEQ ID NO: 6330 - DNA, 20 bp, Artificial Sequence
  Description of Artificial Sequence: Synthetic oligonucleotide
ataaataaacaaacacataa

SEQ ID NO: 6331 - DNA, 20 bp, Artificial Sequence
  Description of Artificial Sequence: Synthetic oligonucleotide
taaataaacaaacacataag

SEQ ID NO: 6332 - DNA, 20 bp, Artificial Sequence
  Description of Artificial Sequence: Synthetic oligonucleotide
aaataaacaaacacataagt

SEQ ID NO: 6333 - DNA, 20 bp, Artificial Sequence
  Description of Artificial Sequence: Synthetic oligonucleotide
aataaacaaacacataagta

SEQ ID NO: 6334 - DNA, 20 bp, Artificial Sequence
  Description of Artificial Sequence: Synthetic oligonucleotide
ataaacaaacacataagtaa

SEQ ID NO: 6335 - DNA, 20 bp, Artificial Sequence
  Description of Artificial Sequence: Synthetic oligonucleotide
taaacaaacacataagtaaa

SEQ ID NO: 6336 - DNA, 20 bp, Artificial Sequence
  Description of Artificial Sequence: Synthetic oligonucleotide
aaacaaacacataagtaaat

SEQ ID NO: 6337 - DNA, 20 bp, Artificial Sequence
  Description of Artificial Sequence: Synthetic oligonucleotide
aacaaacacataagtaaata

SEQ ID NO: 6338 - DNA, 20 bp, Artificial Sequence
  Description of Artificial Sequence: Synthetic oligonucleotide
acaaacacataagtaaataa

SEQ ID NO: 6339 - DNA, 20 bp, Artificial Sequence
  Description of Artificial Sequence: Synthetic oligonucleotide
caaacacataagtaaataaa

SEQ ID NO: 6340 - DNA, 20 bp, Artificial Sequence
  Description of Artificial Sequence: Synthetic oligonucleotide
aaacacataagtaaataaaa

SEQ ID NO: 6341 - DNA, 20 bp, Artificial Sequence
  Description of Artificial Sequence: Synthetic oligonucleotide
aacacataagtaaataaaag

SEQ ID NO: 6342 - DNA, 20 bp, Artificial Sequence
  Description of Artificial Sequence: Synthetic oligonucleotide
acacataagtaaataaaagt

SEQ ID NO: 6343 - DNA, 20 bp, Artificial Sequence
  Description of Artificial Sequence: Synthetic oligonucleotide
cacataagtaaataaaagta

SEQ ID NO: 6344 - DNA, 20 bp, Artificial Sequence
  Description of Artificial Sequence: Synthetic oligonucleotide
acataagtaaataaaagtaa

SEQ ID NO: 6345 - DNA, 20 bp, Artificial Sequence
  Description of Artificial Sequence: Synthetic oligonucleotide
cataagtaaataaaagtaaa

SEQ ID NO: 6346 - DNA, 20 bp, Artificial Sequence
  Description of Artificial Sequence: Synthetic oligonucleotide
ataagtaaataaaagtaaag

SEQ ID NO: 6347 - DNA, 20 bp, Artificial Sequence
  Description of Artificial Sequence: Synthetic oligonucleotide
taagtaaataaaagtaaaga

SEQ ID NO: 6348 - DNA, 20 bp, Artificial Sequence
  Description of Artificial Sequence: Synthetic oligonucleotide
aagtaaataaaagtaaagac

SEQ ID NO: 6349 - DNA, 20 bp, Artificial Sequence
  Description of Artificial Sequence: Synthetic oligonucleotide
agtaaataaaagtaaagacg

SEQ ID NO: 6350 - DNA, 20 bp, Artificial Sequence
  Description of Artificial Sequence: Synthetic oligonucleotide
gtaaataaaagtaaagacgg

SEQ ID NO: 6351 - DNA, 20 bp, Artificial Sequence
  Description of Artificial Sequence: Synthetic oligonucleotide
taaataaaagtaaagacggt

SEQ ID NO: 6352 - DNA, 20 bp, Artificial Sequence
  Description of Artificial Sequence: Synthetic oligonucleotide
aaataaaagtaaagacggtc

SEQ ID NO: 6353 - DNA, 20 bp, Artificial Sequence
  Description of Artificial Sequence: Synthetic oligonucleotide
aataaaagtaaagacggtca

SEQ ID NO: 6354 - DNA, 20 bp, Artificial Sequence
  Description of Artificial Sequence: Synthetic oligonucleotide
ataaaagtaaagacggtcaa

SEQ ID NO: 6355 - DNA, 20 bp, Artificial Sequence
  Description of Artificial Sequence: Synthetic oligonucleotide
taaaagtaaagacggtcaag

SEQ ID NO: 6356 - DNA, 20 bp, Artificial Sequence
  Description of Artificial Sequence: Synthetic oligonucleotide
aaaagtaaagacggtcaaga

SEQ ID NO: 6357 - DNA, 20 bp, Artificial Sequence
  Description of Artificial Sequence: Synthetic oligonucleotide
aaagtaaagacggtcaagac

SEQ ID NO: 6358 - DNA, 20 bp, Artificial Sequence
  Description of Artificial Sequence: Synthetic oligonucleotide
aagtaaagacggtcaagacc

SEQ ID NO: 6359 - DNA, 20 bp, Artificial Sequence
  Description of Artificial Sequence: Synthetic oligonucleotide
agtaaagacggtcaagaccc

SEQ ID NO: 6360 - DNA, 20 bp, Artificial Sequence
  Description of Artificial Sequence: Synthetic oligonucleotide
gtaaagacggtcaagaccct

SEQ ID NO: 6361 - DNA, 20 bp, Artificial Sequence
  Description of Artificial Sequence: Synthetic oligonucleotide
taaagacggtcaagaccctt

SEQ ID NO: 6362 - DNA, 20 bp, Artificial Sequence
  Description of Artificial Sequence: Synthetic oligonucleotide
aaagacggtcaagacccttt

SEQ ID NO: 6363 - DNA, 20 bp, Artificial Sequence
  Description of Artificial Sequence: Synthetic oligonucleotide
aagacggtcaagaccctttt

SEQ ID NO: 6364 - DNA, 20 bp, Artificial Sequence
  Description of Artificial Sequence: Synthetic oligonucleotide
agacggtcaagacccttttc

SEQ ID NO: 6365 - DNA, 20 bp, Artificial Sequence
  Description of Artificial Sequence: Synthetic oligonucleotide
gacggtcaagacccttttca

SEQ ID NO: 6366 - DNA, 20 bp, Artificial Sequence
  Description of Artificial Sequence: Synthetic oligonucleotide
acggtcaagacccttttcag

SEQ ID NO: 6367 - DNA, 20 bp, Artificial Sequence
  Description of Artificial Sequence: Synthetic oligonucleotide
cggtcaagacccttttcagg

SEQ ID NO: 6368 - DNA, 20 bp, Artificial Sequence
  Description of Artificial Sequence: Synthetic oligonucleotide
ggtcaagacccttttcagga

SEQ ID NO: 6369 - DNA, 20 bp, Artificial Sequence
  Description of Artificial Sequence: Synthetic oligonucleotide
gtcaagacccttttcaggat

SEQ ID NO: 6370 - DNA, 20 bp, Artificial Sequence
  Description of Artificial Sequence: Synthetic oligonucleotide
tcaagacccttttcaggatg

SEQ ID NO: 6371 - DNA, 20 bp, Artificial Sequence
  Description of Artificial Sequence: Synthetic oligonucleotide
caagacccttttcaggatgg

SEQ ID NO: 6372 - DNA, 20 bp, Artificial Sequence
  Description of Artificial Sequence: Synthetic oligonucleotide
aagacccttttcaggatggg

SEQ ID NO: 6373 - DNA, 20 bp, Artificial Sequence
  Description of Artificial Sequence: Synthetic oligonucleotide
agacccttttcaggatggga

SEQ ID NO: 6374 - DNA, 20 bp, Artificial Sequence
  Description of Artificial Sequence: Synthetic oligonucleotide
gacccttttcaggatgggaa

SEQ ID NO: 6375 - DNA, 20 bp, Artificial Sequence
  Description of Artificial Sequence: Synthetic oligonucleotide
acccttttcaggatgggaaa

SEQ ID NO: 6376 - DNA, 20 bp, Artificial Sequence
  Description of Artificial Sequence: Synthetic oligonucleotide
cccttttcaggatgggaaaa

SEQ ID NO: 6377 - DNA, 20 bp, Artificial Sequence
  Description of Artificial Sequence: Synthetic oligonucleotide
ccttttcaggatgggaaaac

SEQ ID NO: 6378 - DNA, 20 bp, Artificial Sequence
  Description of Artificial Sequence: Synthetic oligonucleotide
cttttcaggatgggaaaact

SEQ ID NO: 6379 - DNA, 20 bp, Artificial Sequence
  Description of Artificial Sequence: Synthetic oligonucleotide
ttttcaggatgggaaaactg

SEQ ID NO: 6380 - DNA, 20 bp, Artificial Sequence
  Description of Artificial Sequence: Synthetic oligonucleotide
tttcaggatgggaaaactga

SEQ ID NO: 6381 - DNA, 20 bp, Artificial Sequence
  Description of Artificial Sequence: Synthetic oligonucleotide
ttcaggatgggaaaactgag

SEQ ID NO: 6382 - DNA, 20 bp, Artificial Sequence
  Description of Artificial Sequence: Synthetic oligonucleotide
tcaggatgggaaaactgagg

SEQ ID NO: 6383 - DNA, 20 bp, Artificial Sequence
  Description of Artificial Sequence: Synthetic oligonucleotide
caggatgggaaaactgaggc

SEQ ID NO: 6384 - DNA, 20 bp, Artificial Sequence
  Description of Artificial Sequence: Synthetic oligonucleotide
aggatgggaaaactgaggcc

SEQ ID NO: 6385 - DNA, 20 bp, Artificial Sequence
  Description of Artificial Sequence: Synthetic oligonucleotide
ggatgggaaaactgaggcca

SEQ ID NO: 6386 - DNA, 20 bp, Artificial Sequence
  Description of Artificial Sequence: Synthetic oligonucleotide
gatgggaaaactgaggccag

SEQ ID NO: 6387 - DNA, 20 bp, Artificial Sequence
  Description of Artificial Sequence: Synthetic oligonucleotide
atgggaaaactgaggccaga

SEQ ID NO: 6388 - DNA, 20 bp, Artificial Sequence
  Description of Artificial Sequence: Synthetic oligonucleotide
tgggaaaactgaggccagat

SEQ ID NO: 6389 - DNA, 20 bp, Artificial Sequence
  Description of Artificial Sequence: Synthetic oligonucleotide
gggaaaactgaggccagata

SEQ ID NO: 6390 - DNA, 20 bp, Artificial Sequence
  Description of Artificial Sequence: Synthetic oligonucleotide
ggaaaactgaggccagatag

SEQ ID NO: 6391 - DNA, 20 bp, Artificial Sequence
  Description of Artificial Sequence: Synthetic oligonucleotide
gaaaactgaggccagatagg

SEQ ID NO: 6392 - DNA, 20 bp, Artificial Sequence
  Description of Artificial Sequence: Synthetic oligonucleotide
aaaactgaggccagataggc

SEQ ID NO: 6393 - DNA, 20 bp, Artificial Sequence
  Description of Artificial Sequence: Synthetic oligonucleotide
aaactgaggccagataggct

SEQ ID NO: 6394 - DNA, 20 bp, Artificial Sequence
  Description of Artificial Sequence: Synthetic oligonucleotide
aactgaggccagataggcta

SEQ ID NO: 6395 - DNA, 20 bp, Artificial Sequence
  Description of Artificial Sequence: Synthetic oligonucleotide
actgaggccagataggctaa

SEQ ID NO: 6396 - DNA, 20 bp, Artificial Sequence
  Description of Artificial Sequence: Synthetic oligonucleotide
ctgaggccagataggctaag

SEQ ID NO: 6397 - DNA, 20 bp, Artificial Sequence
  Description of Artificial Sequence: Synthetic oligonucleotide
tgaggccagataggctaagt

SEQ ID NO: 6398 - DNA, 20 bp, Artificial Sequence
  Description of Artificial Sequence: Synthetic oligonucleotide
gaggccagataggctaagtt

SEQ ID NO: 6399 - DNA, 20 bp, Artificial Sequence
  Description of Artificial Sequence: Synthetic oligonucleotide
aggccagataggctaagtta

SEQ ID NO: 6400 - DNA, 20 bp, Artificial Sequence
  Description of Artificial Sequence: Synthetic oligonucleotide
ggccagataggctaagttag

SEQ ID NO: 6401 - DNA, 20 bp, Artificial Sequence
  Description of Artificial Sequence: Synthetic oligonucleotide
gccagataggctaagttagt

SEQ ID NO: 6402 - DNA, 20 bp, Artificial Sequence
  Description of Artificial Sequence: Synthetic oligonucleotide
ccagataggctaagttagtg

SEQ ID NO: 6403 - DNA, 20 bp, Artificial Sequence
  Description of Artificial Sequence: Synthetic oligonucleotide
cagataggctaagttagtgg

SEQ ID NO: 6404 - DNA, 20 bp, Artificial Sequence
  Description of Artificial Sequence: Synthetic oligonucleotide
agataggctaagttagtggc

SEQ ID NO: 6405 - DNA, 20 bp, Artificial Sequence
  Description of Artificial Sequence: Synthetic oligonucleotide
gataggctaagttagtggcc

SEQ ID NO: 6406 - DNA, 20 bp, Artificial Sequence
  Description of Artificial Sequence: Synthetic oligonucleotide
ataggctaagttagtggccc

SEQ ID NO: 6407 - DNA, 20 bp, Artificial Sequence
  Description of Artificial Sequence: Synthetic oligonucleotide
taggctaagttagtggccca

SEQ ID NO: 6408 - DNA, 20 bp, Artificial Sequence
  Description of Artificial Sequence: Synthetic oligonucleotide
aggctaagttagtggcccaa

SEQ ID NO: 6409 - DNA, 20 bp, Artificial Sequence
  Description of Artificial Sequence: Synthetic oligonucleotide
ggctaagttagtggcccaat

SEQ ID NO: 6410 - DNA, 20 bp, Artificial Sequence
  Description of Artificial Sequence: Synthetic oligonucleotide
gctaagttagtggcccaatc

SEQ ID NO: 6411 - DNA, 20 bp, Artificial Sequence
  Description of Artificial Sequence: Synthetic oligonucleotide
ctaagttagtggcccaatca

SEQ ID NO: 6412 - DNA, 20 bp, Artificial Sequence
  Description of Artificial Sequence: Synthetic oligonucleotide
taagttagtggcccaatcac

SEQ ID NO: 6413 - DNA, 20 bp, Artificial Sequence
  Description of Artificial Sequence: Synthetic oligonucleotide
aagttagtggcccaatcaca

SEQ ID NO: 6414 - DNA, 20 bp, Artificial Sequence
  Description of Artificial Sequence: Synthetic oligonucleotide
agttagtggcccaatcacac

SEQ ID NO: 6415 - DNA, 20 bp, Artificial Sequence
  Description of Artificial Sequence: Synthetic oligonucleotide
gttagtggcccaatcacaca

SEQ ID NO: 6416 - DNA, 20 bp, Artificial Sequence
  Description of Artificial Sequence: Synthetic oligonucleotide
ttagtggcccaatcacacac

SEQ ID NO: 6417 - DNA, 20 bp, Artificial Sequence
  Description of Artificial Sequence: Synthetic oligonucleotide
tagtggcccaatcacacaca

SEQ ID NO: 6418 - DNA, 20 bp, Artificial Sequence
  Description of Artificial Sequence: Synthetic oligonucleotide
agtggcccaatcacacacac

SEQ ID NO: 6419 - DNA, 20 bp, Artificial Sequence
  Description of Artificial Sequence: Synthetic oligonucleotide
gtggcccaatcacacacacg

SEQ ID NO: 6420 - DNA, 20 bp, Artificial Sequence
  Description of Artificial Sequence: Synthetic oligonucleotide
tggcccaatcacacacacgg

SEQ ID NO: 6421 - DNA, 20 bp, Artificial Sequence
  Description of Artificial Sequence: Synthetic oligonucleotide
ggcccaatcacacacacggc

SEQ ID NO: 6422 - DNA, 20 bp, Artificial Sequence
  Description of Artificial Sequence: Synthetic oligonucleotide
gcccaatcacacacacggca

SEQ ID NO: 6423 - DNA, 20 bp, Artificial Sequence
  Description of Artificial Sequence: Synthetic oligonucleotide
cccaatcacacacacggcat

SEQ ID NO: 6424 - DNA, 20 bp, Artificial Sequence
  Description of Artificial Sequence: Synthetic oligonucleotide
ccaatcacacacacggcatg

SEQ ID NO: 6425 - DNA, 20 bp, Artificial Sequence
  Description of Artificial Sequence: Synthetic oligonucleotide
caatcacacacacggcatgt

SEQ ID NO: 6426 - DNA, 20 bp, Artificial Sequence
  Description of Artificial Sequence: Synthetic oligonucleotide
aatcacacacacggcatgta

SEQ ID NO: 6427 - DNA, 20 bp, Artificial Sequence
  Description of Artificial Sequence: Synthetic oligonucleotide
atcacacacacggcatgtaa

SEQ ID NO: 6428 - DNA, 20 bp, Artificial Sequence
  Description of Artificial Sequence: Synthetic oligonucleotide
tcacacacacggcatgtaag

SEQ ID NO: 6429 - DNA, 20 bp, Artificial Sequence
  Description of Artificial Sequence: Synthetic oligonucleotide
cacacacacggcatgtaagg

SEQ ID NO: 6430 - DNA, 20 bp, Artificial Sequence
  Description of Artificial Sequence: Synthetic oligonucleotide
acacacacggcatgtaagga

SEQ ID NO: 6431 - DNA, 20 bp, Artificial Sequence
  Description of Artificial Sequence: Synthetic oligonucleotide
cacacacggcatgtaaggaa

SEQ ID NO: 6432 - DNA, 20 bp, Artificial Sequence
  Description of Artificial Sequence: Synthetic oligonucleotide
acacacggcatgtaaggaag

SEQ ID NO: 6433 - DNA, 20 bp, Artificial Sequence
  Description of Artificial Sequence: Synthetic oligonucleotide
cacacggcatgtaaggaaga

SEQ ID NO: 6434 - DNA, 20 bp, Artificial Sequence
  Description of Artificial Sequence: Synthetic oligonucleotide
acacggcatgtaaggaagag

SEQ ID NO: 6435 - DNA, 20 bp, Artificial Sequence
  Description of Artificial Sequence: Synthetic oligonucleotide
cacggcatgtaaggaagagg

SEQ ID NO: 6436 - DNA, 20 bp, Artificial Sequence
  Description of Artificial Sequence: Synthetic oligonucleotide
acggcatgtaaggaagaggt

SEQ ID NO: 6437 - DNA, 20 bp, Artificial Sequence
  Description of Artificial Sequence: Synthetic oligonucleotide
cggcatgtaaggaagaggtg

SEQ ID NO: 6438 - DNA, 20 bp, Artificial Sequence
  Description of Artificial Sequence: Synthetic oligonucleotide
ggcatgtaaggaagaggtgg

SEQ ID NO: 6439 - DNA, 20 bp, Artificial Sequence
  Description of Artificial Sequence: Synthetic oligonucleotide
gcatgtaaggaagaggtggg

SEQ ID NO: 6440 - DNA, 20 bp, Artificial Sequence
  Description of Artificial Sequence: Synthetic oligonucleotide
catgtaaggaagaggtgggg

SEQ ID NO: 6441 - DNA, 20 bp, Artificial Sequence
  Description of Artificial Sequence: Synthetic oligonucleotide
atgtaaggaagaggtggggg

SEQ ID NO: 6442 - DNA, 20 bp, Artificial Sequence
  Description of Artificial Sequence: Synthetic oligonucleotide
tgtaaggaagaggtgggggc

SEQ ID NO: 6443 - DNA, 20 bp, Artificial Sequence
  Description of Artificial Sequence: Synthetic oligonucleotide
gtaaggaagaggtgggggca

SEQ ID NO: 6444 - DNA, 20 bp, Artificial Sequence
  Description of Artificial Sequence: Synthetic oligonucleotide
taaggaagaggtgggggcag

SEQ ID NO: 6445 - DNA, 20 bp, Artificial Sequence
  Description of Artificial Sequence: Synthetic oligonucleotide
aaggaagaggtgggggcagg

SEQ ID NO: 6446 - DNA, 20 bp, Artificial Sequence
  Description of Artificial Sequence: Synthetic oligonucleotide
aggaagaggtgggggcagga

SEQ ID NO: 6447 - DNA, 20 bp, Artificial Sequence
  Description of Artificial Sequence: Synthetic oligonucleotide
ggaagaggtgggggcaggaa

SEQ ID NO: 6448 - DNA, 20 bp, Artificial Sequence
  Description of Artificial Sequence: Synthetic oligonucleotide
gaagaggtgggggcaggaaa

SEQ ID NO: 6449 - DNA, 20 bp, Artificial Sequence
  Description of Artificial Sequence: Synthetic oligonucleotide
aagaggtgggggcaggaaac

SEQ ID NO: 6450 - DNA, 20 bp, Artificial Sequence
  Description of Artificial Sequence: Synthetic oligonucleotide
agaggtgggggcaggaaaca

SEQ ID NO: 6451 - DNA, 20 bp, Artificial Sequence
  Description of Artificial Sequence: Synthetic oligonucleotide
gaggtgggggcaggaaacag

SEQ ID NO: 6452 - DNA, 20 bp, Artificial Sequence
  Description of Artificial Sequence: Synthetic oligonucleotide
aggtgggggcaggaaacaga

SEQ ID NO: 6453 - DNA, 20 bp, Artificial Sequence
  Description of Artificial Sequence: Synthetic oligonucleotide
ggtgggggcaggaaacagat

SEQ ID NO: 6454 - DNA, 20 bp, Artificial Sequence
  Description of Artificial Sequence: Synthetic oligonucleotide
gtgggggcaggaaacagatg

SEQ ID NO: 6455 - DNA, 20 bp, Artificial Sequence
  Description of Artificial Sequence: Synthetic oligonucleotide
tgggggcaggaaacagatgc

SEQ ID NO: 6456 - DNA, 20 bp, Artificial Sequence
  Description of Artificial Sequence: Synthetic oligonucleotide
gggggcaggaaacagatgca

SEQ ID NO: 6457 - DNA, 20 bp, Artificial Sequence
  Description of Artificial Sequence: Synthetic oligonucleotide
ggggcaggaaacagatgcaa

SEQ ID NO: 6458 - DNA, 20 bp, Artificial Sequence
  Description of Artificial Sequence: Synthetic oligonucleotide
gggcaggaaacagatgcaat

SEQ ID NO: 6459 - DNA, 20 bp, Artificial Sequence
  Description of Artificial Sequence: Synthetic oligonucleotide
ggcaggaaacagatgcaatg

SEQ ID NO: 6460 - DNA, 20 bp, Artificial Sequence
  Description of Artificial Sequence: Synthetic oligonucleotide
gcaggaaacagatgcaatgt

SEQ ID NO: 6461 - DNA, 20 bp, Artificial Sequence
  Description of Artificial Sequence: Synthetic oligonucleotide
caggaaacagatgcaatgtg

SEQ ID NO: 6462 - DNA, 20 bp, Artificial Sequence
  Description of Artificial Sequence: Synthetic oligonucleotide
aggaaacagatgcaatgtgg

SEQ ID NO: 6463 - DNA, 20 bp, Artificial Sequence
  Description of Artificial Sequence: Synthetic oligonucleotide
ggaaacagatgcaatgtggg

SEQ ID NO: 6464 - DNA, 20 bp, Artificial Sequence
  Description of Artificial Sequence: Synthetic oligonucleotide
gaaacagatgcaatgtgggg

SEQ ID NO: 6465 - DNA, 20 bp, Artificial Sequence
  Description of Artificial Sequence: Synthetic oligonucleotide
aaacagatgcaatgtggggt

SEQ ID NO: 6466 - DNA, 20 bp, Artificial Sequence
  Description of Artificial Sequence: Synthetic oligonucleotide
aacagatgcaatgtggggtt

SEQ ID NO: 6467 - DNA, 20 bp, Artificial Sequence
  Description of Artificial Sequence: Synthetic oligonucleotide
acagatgcaatgtggggttg

SEQ ID NO: 6468 - DNA, 20 bp, Artificial Sequence
  Description of Artificial Sequence: Synthetic oligonucleotide
cagatgcaatgtggggttga

SEQ ID NO: 6469 - DNA, 20 bp, Artificial Sequence
  Description of Artificial Sequence: Synthetic oligonucleotide
agatgcaatgtggggttgaa

SEQ ID NO: 6470 - DNA, 20 bp, Artificial Sequence
  Description of Artificial Sequence: Synthetic oligonucleotide
gatgcaatgtggggttgaag

SEQ ID NO: 6471 - DNA, 20 bp, Artificial Sequence
  Description of Artificial Sequence: Synthetic oligonucleotide
atgcaatgtggggttgaagg

SEQ ID NO: 6472 - DNA, 20 bp, Artificial Sequence
  Description of Artificial Sequence: Synthetic oligonucleotide
tgcaatgtggggttgaaggc

SEQ ID NO: 6473 - DNA, 20 bp, Artificial Sequence
  Description of Artificial Sequence: Synthetic oligonucleotide
gcaatgtggggttgaaggca

SEQ ID NO: 6474 - DNA, 20 bp, Artificial Sequence
  Description of Artificial Sequence: Synthetic oligonucleotide
caatgtggggttgaaggcag

SEQ ID NO: 6475 - DNA, 20 bp, Artificial Sequence
  Description of Artificial Sequence: Synthetic oligonucleotide
aatgtggggttgaaggcagg

SEQ ID NO: 6476 - DNA, 20 bp, Artificial Sequence
  Description of Artificial Sequence: Synthetic oligonucleotide
atgtggggttgaaggcagga

SEQ ID NO: 6477 - DNA, 20 bp, Artificial Sequence
  Description of Artificial Sequence: Synthetic oligonucleotide
tgtggggttgaaggcaggac

SEQ ID NO: 6478 - DNA, 20 bp, Artificial Sequence
  Description of Artificial Sequence: Synthetic oligonucleotide
gtggggttgaaggcaggaca

SEQ ID NO: 6479 - DNA, 20 bp, Artificial Sequence
  Description of Artificial Sequence: Synthetic oligonucleotide
tggggttgaaggcaggacag

SEQ ID NO: 6480 - DNA, 20 bp, Artificial Sequence
  Description of Artificial Sequence: Synthetic oligonucleotide
ggggttgaaggcaggacaga

SEQ ID NO: 6481 - DNA, 20 bp, Artificial Sequence
  Description of Artificial Sequence: Synthetic oligonucleotide
gggttgaaggcaggacagag

SEQ ID NO: 6482 - DNA, 20 bp, Artificial Sequence
  Description of Artificial Sequence: Synthetic oligonucleotide
ggttgaaggcaggacagagc

SEQ ID NO: 6483 - DNA, 20 bp, Artificial Sequence
  Description of Artificial Sequence: Synthetic oligonucleotide
gttgaaggcaggacagagca

SEQ ID NO: 6484 - DNA, 20 bp, Artificial Sequence
  Description of Artificial Sequence: Synthetic oligonucleotide
ttgaaggcaggacagagcag

SEQ ID NO: 6485 - DNA, 20 bp, Artificial Sequence
  Description of Artificial Sequence: Synthetic oligonucleotide
tgaaggcaggacagagcagc

SEQ ID NO: 6486 - DNA, 20 bp, Artificial Sequence
  Description of Artificial Sequence: Synthetic oligonucleotide
gaaggcaggacagagcagca

SEQ ID NO: 6487 - DNA, 20 bp, Artificial Sequence
  Description of Artificial Sequence: Synthetic oligonucleotide
aaggcaggacagagcagcag

SEQ ID NO: 6488 - DNA, 20 bp, Artificial Sequence
  Description of Artificial Sequence: Synthetic oligonucleotide
aggcaggacagagcagcaga

SEQ ID NO: 6489 - DNA, 20 bp, Artificial Sequence
  Description of Artificial Sequence: Synthetic oligonucleotide
ggcaggacagagcagcagaa

SEQ ID NO: 6490 - DNA, 20 bp, Artificial Sequence
  Description of Artificial Sequence: Synthetic oligonucleotide
gcaggacagagcagcagaaa

SEQ ID NO: 6491 - DNA, 20 bp, Artificial Sequence
  Description of Artificial Sequence: Synthetic oligonucleotide
caggacagagcagcagaaag

SEQ ID NO: 6492 - DNA, 20 bp, Artificial Sequence
  Description of Artificial Sequence: Synthetic oligonucleotide
aggacagagcagcagaaaga

SEQ ID NO: 6493 - DNA, 20 bp, Artificial Sequence
  Description of Artificial Sequence: Synthetic oligonucleotide
ggacagagcagcagaaagat

SEQ ID NO: 6494 - DNA, 20 bp, Artificial Sequence
  Description of Artificial Sequence: Synthetic oligonucleotide
gacagagcagcagaaagata

SEQ ID NO: 6495 - DNA, 20 bp, Artificial Sequence
  Description of Artificial Sequence: Synthetic oligonucleotide
acagagcagcagaaagataa

SEQ ID NO: 6496 - DNA, 20 bp, Artificial Sequence
  Description of Artificial Sequence: Synthetic oligonucleotide
cagagcagcagaaagataag

SEQ ID NO: 6497 - DNA, 20 bp, Artificial Sequence
  Description of Artificial Sequence: Synthetic oligonucleotide
agagcagcagaaagataagg

SEQ ID NO: 6498 - DNA, 20 bp, Artificial Sequence
  Description of Artificial Sequence: Synthetic oligonucleotide
gagcagcagaaagataagga

SEQ ID NO: 6499 - DNA, 20 bp, Artificial Sequence
  Description of Artificial Sequence: Synthetic oligonucleotide
agcagcagaaagataaggag

SEQ ID NO: 6500 - DNA, 20 bp, Artificial Sequence
  Description of Artificial Sequence: Synthetic oligonucleotide
gcagcagaaagataaggagg

SEQ ID NO: 6501 - DNA, 20 bp, Artificial Sequence
  Description of Artificial Sequence: Synthetic oligonucleotide
cagcagaaagataaggaggg

SEQ ID NO: 6502 - DNA, 20 bp, Artificial Sequence
  Description of Artificial Sequence: Synthetic oligonucleotide
agcagaaagataaggaggga

SEQ ID NO: 6503 - DNA, 20 bp, Artificial Sequence
  Description of Artificial Sequence: Synthetic oligonucleotide
gcagaaagataaggagggaa

SEQ ID NO: 6504 - DNA, 20 bp, Artificial Sequence
  Description of Artificial Sequence: Synthetic oligonucleotide
cagaaagataaggagggaag

SEQ ID NO: 6505 - DNA, 20 bp, Artificial Sequence
  Description of Artificial Sequence: Synthetic oligonucleotide
agaaagataaggagggaagc

SEQ ID NO: 6506 - DNA, 20 bp, Artificial Sequence
  Description of Artificial Sequence: Synthetic oligonucleotide
gaaagataaggagggaagct

SEQ ID NO: 6507 - DNA, 20 bp, Artificial Sequence
  Description of Artificial Sequence: Synthetic oligonucleotide
aaagataaggagggaagctg

SEQ ID NO: 6508 - DNA, 20 bp, Artificial Sequence
  Description of Artificial Sequence: Synthetic oligonucleotide
aagataaggagggaagctgc

SEQ ID NO: 6509 - DNA, 20 bp, Artificial Sequence
  Description of Artificial Sequence: Synthetic oligonucleotide
agataaggagggaagctgct

SEQ ID NO: 6510 - DNA, 20 bp, Artificial Sequence
  Description of Artificial Sequence: Synthetic oligonucleotide
gataaggagggaagctgctg

SEQ ID NO: 6511 - DNA, 20 bp, Artificial Sequence
  Description of Artificial Sequence: Synthetic oligonucleotide
ataaggagggaagctgctgg

SEQ ID NO: 6512 - DNA, 20 bp, Artificial Sequence
  Description of Artificial Sequence: Synthetic oligonucleotide
taaggagggaagctgctggc

SEQ ID NO: 6513 - DNA, 20 bp, Artificial Sequence
  Description of Artificial Sequence: Synthetic oligonucleotide
aaggagggaagctgctggct

SEQ ID NO: 6514 - DNA, 20 bp, Artificial Sequence
  Description of Artificial Sequence: Synthetic oligonucleotide
aggagggaagctgctggctg

SEQ ID NO: 6515 - DNA, 20 bp, Artificial Sequence
  Description of Artificial Sequence: Synthetic oligonucleotide
ggagggaagctgctggctgg

SEQ ID NO: 6516 - DNA, 20 bp, Artificial Sequence
  Description of Artificial Sequence: Synthetic oligonucleotide
gagggaagctgctggctggg

SEQ ID NO: 6517 - DNA, 20 bp, Artificial Sequence
  Description of Artificial Sequence: Synthetic oligonucleotide
agggaagctgctggctgggt

SEQ ID NO: 6518 - DNA, 20 bp, Artificial Sequence
  Description of Artificial Sequence: Synthetic oligonucleotide
gggaagctgctggctgggtg

SEQ ID NO: 6519 - DNA, 20 bp, Artificial Sequence
  Description of Artificial Sequence: Synthetic oligonucleotide
ggaagctgctggctgggtgt

SEQ ID NO: 6520 - DNA, 20 bp, Artificial Sequence
  Description of Artificial Sequence: Synthetic oligonucleotide
gaagctgctggctgggtgtg

SEQ ID NO: 6521 - DNA, 20 bp, Artificial Sequence
  Description of Artificial Sequence: Synthetic oligonucleotide
aagctgctggctgggtgtgg

SEQ ID NO: 6522 - DNA, 20 bp, Artificial Sequence
  Description of Artificial Sequence: Synthetic oligonucleotide
agctgctggctgggtgtggc

SEQ ID NO: 6523 - DNA, 20 bp, Artificial Sequence
  Description of Artificial Sequence: Synthetic oligonucleotide
gctgctggctgggtgtggca

SEQ ID NO: 6524 - DNA, 20 bp, Artificial Sequence
  Description of Artificial Sequence: Synthetic oligonucleotide
ctgctggctgggtgtggcat

SEQ ID NO: 6525 - DNA, 20 bp, Artificial Sequence
  Description of Artificial Sequence: Synthetic oligonucleotide
tgctggctgggtgtggcatg

SEQ ID NO: 6526 - DNA, 20 bp, Artificial Sequence
  Description of Artificial Sequence: Synthetic oligonucleotide
gctggctgggtgtggcatgg

SEQ ID NO: 6527 - DNA, 20 bp, Artificial Sequence
  Description of Artificial Sequence: Synthetic oligonucleotide
ctggctgggtgtggcatggc

SEQ ID NO: 6528 - DNA, 20 bp, Artificial Sequence
  Description of Artificial Sequence: Synthetic oligonucleotide
tggctgggtgtggcatggca

SEQ ID NO: 6529 - DNA, 20 bp, Artificial Sequence
  Description of Artificial Sequence: Synthetic oligonucleotide
ggctgggtgtggcatggcag

SEQ ID NO: 6530 - DNA, 20 bp, Artificial Sequence
  Description of Artificial Sequence: Synthetic oligonucleotide
gctgggtgtggcatggcagg

SEQ ID NO: 6531 - DNA, 20 bp, Artificial Sequence
  Description of Artificial Sequence: Synthetic oligonucleotide
ctgggtgtggcatggcaggg

SEQ ID NO: 6532 - DNA, 20 bp, Artificial Sequence
  Description of Artificial Sequence: Synthetic oligonucleotide
tgggtgtggcatggcagggc

SEQ ID NO: 6533 - DNA, 20 bp, Artificial Sequence
  Description of Artificial Sequence: Synthetic oligonucleotide
gggtgtggcatggcagggcc

SEQ ID NO: 6534 - DNA, 20 bp, Artificial Sequence
  Description of Artificial Sequence: Synthetic oligonucleotide
ggtgtggcatggcagggcct

SEQ ID NO: 6535 - DNA, 20 bp, Artificial Sequence
  Description of Artificial Sequence: Synthetic oligonucleotide
gtgtggcatggcagggcctg

SEQ ID NO: 6536 - DNA, 20 bp, Artificial Sequence
  Description of Artificial Sequence: Synthetic oligonucleotide
tgtggcatggcagggcctgc

SEQ ID NO: 6537 - DNA, 20 bp, Artificial Sequence
  Description of Artificial Sequence: Synthetic oligonucleotide
gtggcatggcagggcctgct

SEQ ID NO: 6538 - DNA, 20 bp, Artificial Sequence
  Description of Artificial Sequence: Synthetic oligonucleotide
tggcatggcagggcctgctc

SEQ ID NO: 6539 - DNA, 20 bp, Artificial Sequence
  Description of Artificial Sequence: Synthetic oligonucleotide
ggcatggcagggcctgctca

SEQ ID NO: 6540 - DNA, 20 bp, Artificial Sequence
  Description of Artificial Sequence: Synthetic oligonucleotide
gcatggcagggcctgctcac

SEQ ID NO: 6541 - DNA, 20 bp, Artificial Sequence
  Description of Artificial Sequence: Synthetic oligonucleotide
catggcagggcctgctcacc

SEQ ID NO: 6542 - DNA, 20 bp, Artificial Sequence
  Description of Artificial Sequence: Synthetic oligonucleotide
atggcagggcctgctcacca

SEQ ID NO: 6543 - DNA, 20 bp, Artificial Sequence
  Description of Artificial Sequence: Synthetic oligonucleotide
tggcagggcctgctcaccag

SEQ ID NO: 6544 - DNA, 20 bp, Artificial Sequence
  Description of Artificial Sequence: Synthetic oligonucleotide
ggcagggcctgctcaccaga

SEQ ID NO: 6545 - DNA, 20 bp, Artificial Sequence
  Description of Artificial Sequence: Synthetic oligonucleotide
gcagggcctgctcaccagag

SEQ ID NO: 6546 - DNA, 20 bp, Artificial Sequence
  Description of Artificial Sequence: Synthetic oligonucleotide
cagggcctgctcaccagaga

SEQ ID NO: 6547 - DNA, 20 bp, Artificial Sequence
  Description of Artificial Sequence: Synthetic oligonucleotide
agggcctgctcaccagagag

SEQ ID NO: 6548 - DNA, 20 bp, Artificial Sequence
  Description of Artificial Sequence: Synthetic oligonucleotide
gggcctgctcaccagagagg

SEQ ID NO: 6549 - DNA, 20 bp, Artificial Sequence
  Description of Artificial Sequence: Synthetic oligonucleotide
ggcctgctcaccagagaggc

SEQ ID NO: 6550 - DNA, 20 bp, Artificial Sequence
  Description of Artificial Sequence: Synthetic oligonucleotide
gcctgctcaccagagaggct

SEQ ID NO: 6551 - DNA, 20 bp, Artificial Sequence
  Description of Artificial Sequence: Synthetic oligonucleotide
cctgctcaccagagaggctc

SEQ ID NO: 6552 - DNA, 20 bp, Artificial Sequence
  Description of Artificial Sequence: Synthetic oligonucleotide
ctgctcaccagagaggctct

SEQ ID NO: 6553 - DNA, 20 bp, Artificial Sequence
  Description of Artificial Sequence: Synthetic oligonucleotide
tgctcaccagagaggctctt

SEQ ID NO: 6554 - DNA, 20 bp, Artificial Sequence
  Description of Artificial Sequence: Synthetic oligonucleotide
gctcaccagagaggctcttg

SEQ ID NO: 6555 - DNA, 20 bp, Artificial Sequence
  Description of Artificial Sequence: Synthetic oligonucleotide
ctcaccagagaggctcttgg

SEQ ID NO: 6556 - DNA, 20 bp, Artificial Sequence
  Description of Artificial Sequence: Synthetic oligonucleotide
tcaccagagaggctcttggc

SEQ ID NO: 6557 - DNA, 20 bp, Artificial Sequence
  Description of Artificial Sequence: Synthetic oligonucleotide
caccagagaggctcttggcg

SEQ ID NO: 6558 - DNA, 20 bp, Artificial Sequence
  Description of Artificial Sequence: Synthetic oligonucleotide
accagagaggctcttggcgc

SEQ ID NO: 6559 - DNA, 20 bp, Artificial Sequence
  Description of Artificial Sequence: Synthetic oligonucleotide
ccagagaggctcttggcgca

SEQ ID NO: 6560 - DNA, 20 bp, Artificial Sequence
  Description of Artificial Sequence: Synthetic oligonucleotide
cagagaggctcttggcgcag

SEQ ID NO: 6561 - DNA, 20 bp, Artificial Sequence
  Description of Artificial Sequence: Synthetic oligonucleotide
agagaggctcttggcgcagt

SEQ ID NO: 6562 - DNA, 20 bp, Artificial Sequence
  Description of Artificial Sequence: Synthetic oligonucleotide
gagaggctcttggcgcagtt

SEQ ID NO: 6563 - DNA, 20 bp, Artificial Sequence
  Description of Artificial Sequence: Synthetic oligonucleotide
agaggctcttggcgcagttc

SEQ ID NO: 6564 - DNA, 20 bp, Artificial Sequence
  Description of Artificial Sequence: Synthetic oligonucleotide
gaggctcttggcgcagttct

SEQ ID NO: 6565 - DNA, 20 bp, Artificial Sequence
  Description of Artificial Sequence: Synthetic oligonucleotide
aggctcttggcgcagttctt

SEQ ID NO: 6566 - DNA, 20 bp, Artificial Sequence
  Description of Artificial Sequence: Synthetic oligonucleotide
ggctcttggcgcagttcttg

SEQ ID NO: 6567 - DNA, 20 bp, Artificial Sequence
  Description of Artificial Sequence: Synthetic oligonucleotide
gctcttggcgcagttcttgt

SEQ ID NO: 6568 - DNA, 20 bp, Artificial Sequence
  Description of Artificial Sequence: Synthetic oligonucleotide
ctcttggcgcagttcttgtc

SEQ ID NO: 6569 - DNA, 20 bp, Artificial Sequence
  Description of Artificial Sequence: Synthetic oligonucleotide
tcttggcgcagttcttgtcc

SEQ ID NO: 6570 - DNA, 20 bp, Artificial Sequence
  Description of Artificial Sequence: Synthetic oligonucleotide
cttggcgcagttcttgtccc

SEQ ID NO: 6571 - DNA, 20 bp, Artificial Sequence
  Description of Artificial Sequence: Synthetic oligonucleotide
ttggcgcagttcttgtccct

SEQ ID NO: 6572 - DNA, 20 bp, Artificial Sequence
  Description of Artificial Sequence: Synthetic oligonucleotide
tggcgcagttcttgtccctg

SEQ ID NO: 6573 - DNA, 20 bp, Artificial Sequence
  Description of Artificial Sequence: Synthetic oligonucleotide
ggcgcagttcttgtccctgc

SEQ ID NO: 6574 - DNA, 20 bp, Artificial Sequence
  Description of Artificial Sequence: Synthetic oligonucleotide
gcgcagttcttgtccctgcg

SEQ ID NO: 6575 - DNA, 20 bp, Artificial Sequence
  Description of Artificial Sequence: Synthetic oligonucleotide
cgcagttcttgtccctgcgg

SEQ ID NO: 6576 - DNA, 20 bp, Artificial Sequence
  Description of Artificial Sequence: Synthetic oligonucleotide
gcagttcttgtccctgcgga

SEQ ID NO: 6577 - DNA, 20 bp, Artificial Sequence
  Description of Artificial Sequence: Synthetic oligonucleotide
cagttcttgtccctgcggag

SEQ ID NO: 6578 - DNA, 20 bp, Artificial Sequence
  Description of Artificial Sequence: Synthetic oligonucleotide
agttcttgtccctgcggagg

SEQ ID NO: 6579 - DNA, 20 bp, Artificial Sequence
  Description of Artificial Sequence: Synthetic oligonucleotide
gttcttgtccctgcggaggt

SEQ ID NO: 6580 - DNA, 20 bp, Artificial Sequence
  Description of Artificial Sequence: Synthetic oligonucleotide
ttcttgtccctgcggaggtc

SEQ ID NO: 6581 - DNA, 20 bp, Artificial Sequence
  Description of Artificial Sequence: Synthetic oligonucleotide
tcttgtccctgcggaggtcg

SEQ ID NO: 6582 - DNA, 20 bp, Artificial Sequence
  Description of Artificial Sequence: Synthetic oligonucleotide
cttgtccctgcggaggtcgt

SEQ ID NO: 6583 - DNA, 20 bp, Artificial Sequence
  Description of Artificial Sequence: Synthetic oligonucleotide
ttgtccctgcggaggtcgtg

SEQ ID NO: 6584 - DNA, 20 bp, Artificial Sequence
  Description of Artificial Sequence: Synthetic oligonucleotide
tgtccctgcggaggtcgtga

SEQ ID NO: 6585 - DNA, 20 bp, Artificial Sequence
  Description of Artificial Sequence: Synthetic oligonucleotide
gtccctgcggaggtcgtgat

SEQ ID NO: 6586 - DNA, 20 bp, Artificial Sequence
  Description of Artificial Sequence: Synthetic oligonucleotide
tccctgcggaggtcgtgatc

SEQ ID NO: 6587 - DNA, 20 bp, Artificial Sequence
  Description of Artificial Sequence: Synthetic oligonucleotide
ccctgcggaggtcgtgatcc

SEQ ID NO: 6588 - DNA, 20 bp, Artificial Sequence
  Description of Artificial Sequence: Synthetic oligonucleotide
cctgcggaggtcgtgatcct

SEQ ID NO: 6589 - DNA, 20 bp, Artificial Sequence
  Description of Artificial Sequence: Synthetic oligonucleotide
ctgcggaggtcgtgatcctg

SEQ ID NO: 6590 - DNA, 20 bp, Artificial Sequence
  Description of Artificial Sequence: Synthetic oligonucleotide
tgcggaggtcgtgatcctgg

SEQ ID NO: 6591 - DNA, 20 bp, Artificial Sequence
  Description of Artificial Sequence: Synthetic oligonucleotide
gcggaggtcgtgatcctggt

SEQ ID NO: 6592 - DNA, 20 bp, Artificial Sequence
  Description of Artificial Sequence: Synthetic oligonucleotide
cggaggtcgtgatcctggtc

SEQ ID NO: 6593 - DNA, 20 bp, Artificial Sequence
  Description of Artificial Sequence: Synthetic oligonucleotide
ggaggtcgtgatcctggtcc

SEQ ID NO: 6594 - DNA, 20 bp, Artificial Sequence
  Description of Artificial Sequence: Synthetic oligonucleotide
gaggtcgtgatcctggtccc

SEQ ID NO: 6595 - DNA, 20 bp, Artificial Sequence
  Description of Artificial Sequence: Synthetic oligonucleotide
aggtcgtgatcctggtccca

SEQ ID NO: 6596 - DNA, 20 bp, Artificial Sequence
  Description of Artificial Sequence: Synthetic oligonucleotide
ggtcgtgatcctggtcccaa

SEQ ID NO: 6597 - DNA, 20 bp, Artificial Sequence
  Description of Artificial Sequence: Synthetic oligonucleotide
gtcgtgatcctggtcccaag

SEQ ID NO: 6598 - DNA, 20 bp, Artificial Sequence
  Description of Artificial Sequence: Synthetic oligonucleotide
tcgtgatcctggtcccaagt

SEQ ID NO: 6599 - DNA, 20 bp, Artificial Sequence
  Description of Artificial Sequence: Synthetic oligonucleotide
cgtgatcctggtcccaagtg

SEQ ID NO: 6600 - DNA, 20 bp, Artificial Sequence
  Description of Artificial Sequence: Synthetic oligonucleotide
gtgatcctggtcccaagtgg

SEQ ID NO: 6601 - DNA, 20 bp, Artificial Sequence
  Description of Artificial Sequence: Synthetic oligonucleotide
tgatcctggtcccaagtgga

SEQ ID NO: 6602 - DNA, 20 bp, Artificial Sequence
  Description of Artificial Sequence: Synthetic oligonucleotide
gatcctggtcccaagtggag

SEQ ID NO: 6603 - DNA, 20 bp, Artificial Sequence
  Description of Artificial Sequence: Synthetic oligonucleotide
atcctggtcccaagtggaga

SEQ ID NO: 6604 - DNA, 20 bp, Artificial Sequence
  Description of Artificial Sequence: Synthetic oligonucleotide
tcctggtcccaagtggagaa

SEQ ID NO: 6605 - DNA, 20 bp, Artificial Sequence
  Description of Artificial Sequence: Synthetic oligonucleotide
cctggtcccaagtggagaag

SEQ ID NO: 6606 - DNA, 20 bp, Artificial Sequence
  Description of Artificial Sequence: Synthetic oligonucleotide
ctggtcccaagtggagaagg

SEQ ID NO: 6607 - DNA, 20 bp, Artificial Sequence
  Description of Artificial Sequence: Synthetic oligonucleotide
tggtcccaagtggagaaggg

SEQ ID NO: 6608 - DNA, 20 bp, Artificial Sequence
  Description of Artificial Sequence: Synthetic oligonucleotide
ggtcccaagtggagaagggt

SEQ ID NO: 6609 - DNA, 20 bp, Artificial Sequence
  Description of Artificial Sequence: Synthetic oligonucleotide
gtcccaagtggagaagggta

SEQ ID NO: 6610 - DNA, 20 bp, Artificial Sequence
  Description of Artificial Sequence: Synthetic oligonucleotide
tcccaagtggagaagggtac

SEQ ID NO: 6611 - DNA, 20 bp, Artificial Sequence
  Description of Artificial Sequence: Synthetic oligonucleotide
cccaagtggagaagggtacg

SEQ ID NO: 6612 - DNA, 20 bp, Artificial Sequence
  Description of Artificial Sequence: Synthetic oligonucleotide
ccaagtggagaagggtacgg

SEQ ID NO: 6613 - DNA, 20 bp, Artificial Sequence
  Description of Artificial Sequence: Synthetic oligonucleotide
caagtggagaagggtacgga

SEQ ID NO: 6614 - DNA, 20 bp, Artificial Sequence
  Description of Artificial Sequence: Synthetic oligonucleotide
aagtggagaagggtacggag

SEQ ID NO: 6615 - DNA, 20 bp, Artificial Sequence
  Description of Artificial Sequence: Synthetic oligonucleotide
agtggagaagggtacggaga

SEQ ID NO: 6616 - DNA, 20 bp, Artificial Sequence
  Description of Artificial Sequence: Synthetic oligonucleotide
gtggagaagggtacggagag

SEQ ID NO: 6617 - DNA, 20 bp, Artificial Sequence
  Description of Artificial Sequence: Synthetic oligonucleotide
tggagaagggtacggagagg

SEQ ID NO: 6618 - DNA, 20 bp, Artificial Sequence
  Description of Artificial Sequence: Synthetic oligonucleotide
ggagaagggtacggagaggc

SEQ ID NO: 6619 - DNA, 20 bp, Artificial Sequence
  Description of Artificial Sequence: Synthetic oligonucleotide
gagaagggtacggagaggcc

SEQ ID NO: 6620 - DNA, 20 bp, Artificial Sequence
  Description of Artificial Sequence: Synthetic oligonucleotide
agaagggtacggagaggccg

SEQ ID NO: 6621 - DNA, 20 bp, Artificial Sequence
  Description of Artificial Sequence: Synthetic oligonucleotide
gaagggtacggagaggccgc

SEQ ID NO: 6622 - DNA, 20 bp, Artificial Sequence
  Description of Artificial Sequence: Synthetic oligonucleotide
aagggtacggagaggccgct

SEQ ID NO: 6623 - DNA, 20 bp, Artificial Sequence
  Description of Artificial Sequence: Synthetic oligonucleotide
agggtacggagaggccgctg

SEQ ID NO: 6624 - DNA, 20 bp, Artificial Sequence
  Description of Artificial Sequence: Synthetic oligonucleotide
gggtacggagaggccgctgg

SEQ ID NO: 6625 - DNA, 20 bp, Artificial Sequence
  Description of Artificial Sequence: Synthetic oligonucleotide
ggtacggagaggccgctggg

SEQ ID NO: 6626 - DNA, 20 bp, Artificial Sequence
  Description of Artificial Sequence: Synthetic oligonucleotide
gtacggagaggccgctgggt

SEQ ID NO: 6627 - DNA, 20 bp, Artificial Sequence
  Description of Artificial Sequence: Synthetic oligonucleotide
tacggagaggccgctgggtg

SEQ ID NO: 6628 - DNA, 20 bp, Artificial Sequence
  Description of Artificial Sequence: Synthetic oligonucleotide
acggagaggccgctgggtgg

SEQ ID NO: 6629 - DNA, 20 bp, Artificial Sequence
  Description of Artificial Sequence: Synthetic oligonucleotide
cggagaggccgctgggtggg

SEQ ID NO: 6630 - DNA, 20 bp, Artificial Sequence
  Description of Artificial Sequence: Synthetic oligonucleotide
ggagaggccgctgggtggga

SEQ ID NO: 6631 - DNA, 20 bp, Artificial Sequence
  Description of Artificial Sequence: Synthetic oligonucleotide
gagaggccgctgggtgggac

SEQ ID NO: 6632 - DNA, 20 bp, Artificial Sequence
  Description of Artificial Sequence: Synthetic oligonucleotide
agaggccgctgggtgggacg

SEQ ID NO: 6633 - DNA, 20 bp, Artificial Sequence
  Description of Artificial Sequence: Synthetic oligonucleotide
gaggccgctgggtgggacgg

SEQ ID NO: 6634 - DNA, 20 bp, Artificial Sequence
  Description of Artificial Sequence: Synthetic oligonucleotide
aggccgctgggtgggacggt

SEQ ID NO: 6635 - DNA, 20 bp, Artificial Sequence
  Description of Artificial Sequence: Synthetic oligonucleotide
ggccgctgggtgggacggtg

SEQ ID NO: 6636 - DNA, 20 bp, Artificial Sequence
  Description of Artificial Sequence: Synthetic oligonucleotide
gccgctgggtgggacggtgg

SEQ ID NO: 6637 - DNA, 20 bp, Artificial Sequence
  Description of Artificial Sequence: Synthetic oligonucleotide
ccgctgggtgggacggtggt

SEQ ID NO: 6638 - DNA, 20 bp, Artificial Sequence
  Description of Artificial Sequence: Synthetic oligonucleotide
cgctgggtgggacggtggtg

SEQ ID NO: 6639 - DNA, 20 bp, Artificial Sequence
  Description of Artificial Sequence: Synthetic oligonucleotide
gctgggtgggacggtggtgg

SEQ ID NO: 6640 - DNA, 20 bp, Artificial Sequence
  Description of Artificial Sequence: Synthetic oligonucleotide
ctgggtgggacggtggtggc

SEQ ID NO: 6641 - DNA, 20 bp, Artificial Sequence
  Description of Artificial Sequence: Synthetic oligonucleotide
tgggtgggacggtggtggcg

SEQ ID NO: 6642 - DNA, 20 bp, Artificial Sequence
  Description of Artificial Sequence: Synthetic oligonucleotide
gggtgggacggtggtggcgc

SEQ ID NO: 6643 - DNA, 20 bp, Artificial Sequence
  Description of Artificial Sequence: Synthetic oligonucleotide
ggtgggacggtggtggcgcc

SEQ ID NO: 6644 - DNA, 20 bp, Artificial Sequence
  Description of Artificial Sequence: Synthetic oligonucleotide
gtgggacggtggtggcgccc

SEQ ID NO: 6645 - DNA, 20 bp, Artificial Sequence
  Description of Artificial Sequence: Synthetic oligonucleotide
tgggacggtggtggcgccca

SEQ ID NO: 6646 - DNA, 20 bp, Artificial Sequence
  Description of Artificial Sequence: Synthetic oligonucleotide
gggacggtggtggcgcccag

SEQ ID NO: 6647 - DNA, 20 bp, Artificial Sequence
  Description of Artificial Sequence: Synthetic oligonucleotide
ggacggtggtggcgcccagc

SEQ ID NO: 6648 - DNA, 20 bp, Artificial Sequence
  Description of Artificial Sequence: Synthetic oligonucleotide
gacggtggtggcgcccagct

SEQ ID NO: 6649 - DNA, 20 bp, Artificial Sequence
  Description of Artificial Sequence: Synthetic oligonucleotide
acggtggtggcgcccagctg

SEQ ID NO: 6650 - DNA, 20 bp, Artificial Sequence
  Description of Artificial Sequence: Synthetic oligonucleotide
cggtggtggcgcccagctgg

SEQ ID NO: 6651 - DNA, 20 bp, Artificial Sequence
  Description of Artificial Sequence: Synthetic oligonucleotide
ggtggtggcgcccagctggc

SEQ ID NO: 6652 - DNA, 20 bp, Artificial Sequence
  Description of Artificial Sequence: Synthetic oligonucleotide
gtggtggcgcccagctggcc

SEQ ID NO: 6653 - DNA, 20 bp, Artificial Sequence
  Description of Artificial Sequence: Synthetic oligonucleotide
tggtggcgcccagctggccg

SEQ ID NO: 6654 - DNA, 20 bp, Artificial Sequence
  Description of Artificial Sequence: Synthetic oligonucleotide
ggtggcgcccagctggccgg

SEQ ID NO: 6655 - DNA, 20 bp, Artificial Sequence
  Description of Artificial Sequence: Synthetic oligonucleotide
gtggcgcccagctggccggc

SEQ ID NO: 6656 - DNA, 20 bp, Artificial Sequence
  Description of Artificial Sequence: Synthetic oligonucleotide
tggcgcccagctggccggcc

SEQ ID NO: 6657 - DNA, 20 bp, Artificial Sequence
  Description of Artificial Sequence: Synthetic oligonucleotide
ggcgcccagctggccggcca

SEQ ID NO: 6658 - DNA, 20 bp, Artificial Sequence
  Description of Artificial Sequence: Synthetic oligonucleotide
gcgcccagctggccggccac

SEQ ID NO: 6659 - DNA, 20 bp, Artificial Sequence
  Description of Artificial Sequence: Synthetic oligonucleotide
cgcccagctggccggccacg

SEQ ID NO: 6660 - DNA, 20 bp, Artificial Sequence
  Description of Artificial Sequence: Synthetic oligonucleotide
gcccagctggccggccacgg

SEQ ID NO: 6661 - DNA, 20 bp, Artificial Sequence
  Description of Artificial Sequence: Synthetic oligonucleotide
cccagctggccggccacggg

SEQ ID NO: 6662 - DNA, 20 bp, Artificial Sequence
  Description of Artificial Sequence: Synthetic oligonucleotide
ccagctggccggccacgggt

SEQ ID NO: 6663 - DNA, 20 bp, Artificial Sequence
  Description of Artificial Sequence: Synthetic oligonucleotide
cagctggccggccacgggtg

SEQ ID NO: 6664 - DNA, 20 bp, Artificial Sequence
  Description of Artificial Sequence: Synthetic oligonucleotide
agctggccggccacgggtgc

SEQ ID NO: 6665 - DNA, 20 bp, Artificial Sequence
  Description of Artificial Sequence: Synthetic oligonucleotide
gctggccggccacgggtgca

SEQ ID NO: 6666 - DNA, 20 bp, Artificial Sequence
  Description of Artificial Sequence: Synthetic oligonucleotide
ctggccggccacgggtgcag

SEQ ID NO: 6667 - DNA, 20 bp, Artificial Sequence
  Description of Artificial Sequence: Synthetic oligonucleotide
tggccggccacgggtgcagt

SEQ ID NO: 6668 - DNA, 20 bp, Artificial Sequence
  Description of Artificial Sequence: Synthetic oligonucleotide
ggccggccacgggtgcagtg

SEQ ID NO: 6669 - DNA, 20 bp, Artificial Sequence
  Description of Artificial Sequence: Synthetic oligonucleotide
gccggccacgggtgcagtga

SEQ ID NO: 6670 - DNA, 20 bp, Artificial Sequence
  Description of Artificial Sequence: Synthetic oligonucleotide
ccggccacgggtgcagtgag

SEQ ID NO: 6671 - DNA, 20 bp, Artificial Sequence
  Description of Artificial Sequence: Synthetic oligonucleotide
cggccacgggtgcagtgagc

SEQ ID NO: 6672 - DNA, 20 bp, Artificial Sequence
  Description of Artificial Sequence: Synthetic oligonucleotide
ggccacgggtgcagtgagct

SEQ ID NO: 6673 - DNA, 20 bp, Artificial Sequence
  Description of Artificial Sequence: Synthetic oligonucleotide
gccacgggtgcagtgagctg

SEQ ID NO: 6674 - DNA, 20 bp, Artificial Sequence
  Description of Artificial Sequence: Synthetic oligonucleotide
ccacgggtgcagtgagctgc

SEQ ID NO: 6675 - DNA, 20 bp, Artificial Sequence
  Description of Artificial Sequence: Synthetic oligonucleotide
cacgggtgcagtgagctgca

SEQ ID NO: 6676 - DNA, 20 bp, Artificial Sequence
  Description of Artificial Sequence: Synthetic oligonucleotide
acgggtgcagtgagctgcag

SEQ ID NO: 6677 - DNA, 20 bp, Artificial Sequence
  Description of Artificial Sequence: Synthetic oligonucleotide
cgggtgcagtgagctgcagg

SEQ ID NO: 6678 - DNA, 20 bp, Artificial Sequence
  Description of Artificial Sequence: Synthetic oligonucleotide
gggtgcagtgagctgcaggc

SEQ ID NO: 6679 - DNA, 20 bp, Artificial Sequence
  Description of Artificial Sequence: Synthetic oligonucleotide
ggtgcagtgagctgcaggct

SEQ ID NO: 6680 - DNA, 20 bp, Artificial Sequence
  Description of Artificial Sequence: Synthetic oligonucleotide
gtgcagtgagctgcaggcta

SEQ ID NO: 6681 - DNA, 20 bp, Artificial Sequence
  Description of Artificial Sequence: Synthetic oligonucleotide
tgcagtgagctgcaggctat

SEQ ID NO: 6682 - DNA, 20 bp, Artificial Sequence
  Description of Artificial Sequence: Synthetic oligonucleotide
gcagtgagctgcaggctata

SEQ ID NO: 6683 - DNA, 20 bp, Artificial Sequence
  Description of Artificial Sequence: Synthetic oligonucleotide
cagtgagctgcaggctatag

SEQ ID NO: 6684 - DNA, 20 bp, Artificial Sequence
  Description of Artificial Sequence: Synthetic oligonucleotide
agtgagctgcaggctatagg

SEQ ID NO: 6685 - DNA, 20 bp, Artificial Sequence
  Description of Artificial Sequence: Synthetic oligonucleotide
gtgagctgcaggctataggc

SEQ ID NO: 6686 - DNA, 20 bp, Artificial Sequence
  Description of Artificial Sequence: Synthetic oligonucleotide
tgagctgcaggctataggcc

SEQ ID NO: 6687 - DNA, 20 bp, Artificial Sequence
  Description of Artificial Sequence: Synthetic oligonucleotide
gagctgcaggctataggccg

SEQ ID NO: 6688 - DNA, 20 bp, Artificial Sequence
  Description of Artificial Sequence: Synthetic oligonucleotide
agctgcaggctataggccgt

SEQ ID NO: 6689 - DNA, 20 bp, Artificial Sequence
  Description of Artificial Sequence: Synthetic oligonucleotide
gctgcaggctataggccgtg

SEQ ID NO: 6690 - DNA, 20 bp, Artificial Sequence
  Description of Artificial Sequence: Synthetic oligonucleotide
ctgcaggctataggccgtgt

SEQ ID NO: 6691 - DNA, 20 bp, Artificial Sequence
  Description of Artificial Sequence: Synthetic oligonucleotide
tgcaggctataggccgtgtc

SEQ ID NO: 6692 - DNA, 20 bp, Artificial Sequence
  Description of Artificial Sequence: Synthetic oligonucleotide
gcaggctataggccgtgtcc

SEQ ID NO: 6693 - DNA, 20 bp, Artificial Sequence
  Description of Artificial Sequence: Synthetic oligonucleotide
caggctataggccgtgtcct

SEQ ID NO: 6694 - DNA, 20 bp, Artificial Sequence
  Description of Artificial Sequence: Synthetic oligonucleotide
aggctataggccgtgtcctc

SEQ ID NO: 6695 - DNA, 20 bp, Artificial Sequence
  Description of Artificial Sequence: Synthetic oligonucleotide
ggctataggccgtgtcctcg

SEQ ID NO: 6696 - DNA, 20 bp, Artificial Sequence
  Description of Artificial Sequence: Synthetic oligonucleotide
gctataggccgtgtcctcgc

SEQ ID NO: 6697 - DNA, 20 bp, Artificial Sequence
  Description of Artificial Sequence: Synthetic oligonucleotide
ctataggccgtgtcctcgcc

SEQ ID NO: 6698 - DNA, 20 bp, Artificial Sequence
  Description of Artificial Sequence: Synthetic oligonucleotide
tataggccgtgtcctcgcca

SEQ ID NO: 6699 - DNA, 20 bp, Artificial Sequence
  Description of Artificial Sequence: Synthetic oligonucleotide
ataggccgtgtcctcgccac

SEQ ID NO: 6700 - DNA, 20 bp, Artificial Sequence
  Description of Artificial Sequence: Synthetic oligonucleotide
taggccgtgtcctcgccacc

SEQ ID NO: 6701 - DNA, 20 bp, Artificial Sequence
  Description of Artificial Sequence: Synthetic oligonucleotide
aggccgtgtcctcgccaccc

SEQ ID NO: 6702 - DNA, 20 bp, Artificial Sequence
  Description of Artificial Sequence: Synthetic oligonucleotide
ggccgtgtcctcgccaccca

SEQ ID NO: 6703 - DNA, 20 bp, Artificial Sequence
  Description of Artificial Sequence: Synthetic oligonucleotide
gccgtgtcctcgccacccag

SEQ ID NO: 6704 - DNA, 20 bp, Artificial Sequence
  Description of Artificial Sequence: Synthetic oligonucleotide
ccgtgtcctcgccacccagg

SEQ ID NO: 6705 - DNA, 20 bp, Artificial Sequence
  Description of Artificial Sequence: Synthetic oligonucleotide
cgtgtcctcgccacccaggt

SEQ ID NO: 6706 - DNA, 20 bp, Artificial Sequence
  Description of Artificial Sequence: Synthetic oligonucleotide
gtgtcctcgccacccaggtg

SEQ ID NO: 6707 - DNA, 20 bp, Artificial Sequence
  Description of Artificial Sequence: Synthetic oligonucleotide
tgtcctcgccacccaggtgc

SEQ ID NO: 6708 - DNA, 20 bp, Artificial Sequence
  Description of Artificial Sequence: Synthetic oligonucleotide
gtcctcgccacccaggtgca

SEQ ID NO: 6709 - DNA, 20 bp, Artificial Sequence
  Description of Artificial Sequence: Synthetic oligonucleotide
tcctcgccacccaggtgcac

SEQ ID NO: 6710 - DNA, 20 bp, Artificial Sequence
  Description of Artificial Sequence: Synthetic oligonucleotide
cctcgccacccaggtgcacg

SEQ ID NO: 6711 - DNA, 20 bp, Artificial Sequence
  Description of Artificial Sequence: Synthetic oligonucleotide
ctcgccacccaggtgcacgg

SEQ ID NO: 6712 - DNA, 20 bp, Artificial Sequence
  Description of Artificial Sequence: Synthetic oligonucleotide
tcgccacccaggtgcacgga

SEQ ID NO: 6713 - DNA, 20 bp, Artificial Sequence
  Description of Artificial Sequence: Synthetic oligonucleotide
cgccacccaggtgcacggag

SEQ ID NO: 6714 - DNA, 20 bp, Artificial Sequence
  Description of Artificial Sequence: Synthetic oligonucleotide
gccacccaggtgcacggaga

SEQ ID NO: 6715 - DNA, 20 bp, Artificial Sequence
  Description of Artificial Sequence: Synthetic oligonucleotide
ccacccaggtgcacggagaa

SEQ ID NO: 6716 - DNA, 20 bp, Artificial Sequence
  Description of Artificial Sequence: Synthetic oligonucleotide
cacccaggtgcacggagaac

SEQ ID NO: 6717 - DNA, 20 bp, Artificial Sequence
  Description of Artificial Sequence: Synthetic oligonucleotide
acccaggtgcacggagaact

SEQ ID NO: 6718 - DNA, 20 bp, Artificial Sequence
  Description of Artificial Sequence: Synthetic oligonucleotide
cccaggtgcacggagaactg

SEQ ID NO: 6719 - DNA, 20 bp, Artificial Sequence
  Description of Artificial Sequence: Synthetic oligonucleotide
ccaggtgcacggagaactgc

SEQ ID NO: 6720 - DNA, 20 bp, Artificial Sequence
  Description of Artificial Sequence: Synthetic oligonucleotide
caggtgcacggagaactgca

SEQ ID NO: 6721 - DNA, 20 bp, Artificial Sequence
  Description of Artificial Sequence: Synthetic oligonucleotide
aggtgcacggagaactgcag

SEQ ID NO: 6722 - DNA, 20 bp, Artificial Sequence
  Description of Artificial Sequence: Synthetic oligonucleotide
ggtgcacggagaactgcagc

SEQ ID NO: 6723 - DNA, 20 bp, Artificial Sequence
  Description of Artificial Sequence: Synthetic oligonucleotide
gtgcacggagaactgcagca

SEQ ID NO: 6724 - DNA, 20 bp, Artificial Sequence
  Description of Artificial Sequence: Synthetic oligonucleotide
tgcacggagaactgcagcaa

SEQ ID NO: 6725 - DNA, 20 bp, Artificial Sequence
  Description of Artificial Sequence: Synthetic oligonucleotide
gcacggagaactgcagcaac

SEQ ID NO: 6726 - DNA, 20 bp, Artificial Sequence
  Description of Artificial Sequence: Synthetic oligonucleotide
cacggagaactgcagcaact

SEQ ID NO: 6727 - DNA, 20 bp, Artificial Sequence
  Description of Artificial Sequence: Synthetic oligonucleotide
acggagaactgcagcaactc

SEQ ID NO: 6728 - DNA, 20 bp, Artificial Sequence
  Description of Artificial Sequence: Synthetic oligonucleotide
cggagaactgcagcaactcg

SEQ ID NO: 6729 - DNA, 20 bp, Artificial Sequence
  Description of Artificial Sequence: Synthetic oligonucleotide
ggagaactgcagcaactcgg

SEQ ID NO: 6730 - DNA, 20 bp, Artificial Sequence
  Description of Artificial Sequence: Synthetic oligonucleotide
gagaactgcagcaactcggc

SEQ ID NO: 6731 - DNA, 20 bp, Artificial Sequence
  Description of Artificial Sequence: Synthetic oligonucleotide
agaactgcagcaactcggcg

SEQ ID NO: 6732 - DNA, 20 bp, Artificial Sequence
  Description of Artificial Sequence: Synthetic oligonucleotide
gaactgcagcaactcggcgt

SEQ ID NO: 6733 - DNA, 20 bp, Artificial Sequence
  Description of Artificial Sequence: Synthetic oligonucleotide
aactgcagcaactcggcgtt

SEQ ID NO: 6734 - DNA, 20 bp, Artificial Sequence
  Description of Artificial Sequence: Synthetic oligonucleotide
actgcagcaactcggcgttg

SEQ ID NO: 6735 - DNA, 20 bp, Artificial Sequence
  Description of Artificial Sequence: Synthetic oligonucleotide
ctgcagcaactcggcgttgc

SEQ ID NO: 6736 - DNA, 20 bp, Artificial Sequence
  Description of Artificial Sequence: Synthetic oligonucleotide
tgcagcaactcggcgttgcc

SEQ ID NO: 6737 - DNA, 20 bp, Artificial Sequence
  Description of Artificial Sequence: Synthetic oligonucleotide
gcagcaactcggcgttgcca

SEQ ID NO: 6738 - DNA, 20 bp, Artificial Sequence
  Description of Artificial Sequence: Synthetic oligonucleotide
cagcaactcggcgttgccat

SEQ ID NO: 6739 - DNA, 20 bp, Artificial Sequence
  Description of Artificial Sequence: Synthetic oligonucleotide
agcaactcggcgttgccatc

SEQ ID NO: 6740 - DNA, 20 bp, Artificial Sequence
  Description of Artificial Sequence: Synthetic oligonucleotide
gcaactcggcgttgccatcc

SEQ ID NO: 6741 - DNA, 20 bp, Artificial Sequence
  Description of Artificial Sequence: Synthetic oligonucleotide
caactcggcgttgccatccc

SEQ ID NO: 6742 - DNA, 20 bp, Artificial Sequence
  Description of Artificial Sequence: Synthetic oligonucleotide
aactcggcgttgccatccca

SEQ ID NO: 6743 - DNA, 20 bp, Artificial Sequence
  Description of Artificial Sequence: Synthetic oligonucleotide
actcggcgttgccatcccag

SEQ ID NO: 6744 - DNA, 20 bp, Artificial Sequence
  Description of Artificial Sequence: Synthetic oligonucleotide
ctcggcgttgccatcccagt

SEQ ID NO: 6745 - DNA, 20 bp, Artificial Sequence
  Description of Artificial Sequence: Synthetic oligonucleotide
tcggcgttgccatcccagtc

SEQ ID NO: 6746 - DNA, 20 bp, Artificial Sequence
  Description of Artificial Sequence: Synthetic oligonucleotide
cggcgttgccatcccagtcc

SEQ ID NO: 6747 - DNA, 20 bp, Artificial Sequence
  Description of Artificial Sequence: Synthetic oligonucleotide
ggcgttgccatcccagtccc

SEQ ID NO: 6748 - DNA, 20 bp, Artificial Sequence
  Description of Artificial Sequence: Synthetic oligonucleotide
gcgttgccatcccagtcccg

SEQ ID NO: 6749 - DNA, 20 bp, Artificial Sequence
  Description of Artificial Sequence: Synthetic oligonucleotide
cgttgccatcccagtcccgc

SEQ ID NO: 6750 - DNA, 20 bp, Artificial Sequence
  Description of Artificial Sequence: Synthetic oligonucleotide
gttgccatcccagtcccgca

SEQ ID NO: 6751 - DNA, 20 bp, Artificial Sequence
  Description of Artificial Sequence: Synthetic oligonucleotide
ttgccatcccagtcccgcag

SEQ ID NO: 6752 - DNA, 20 bp, Artificial Sequence
  Description of Artificial Sequence: Synthetic oligonucleotide
tgccatcccagtcccgcagc

SEQ ID NO: 6753 - DNA, 20 bp, Artificial Sequence
  Description of Artificial Sequence: Synthetic oligonucleotide
gccatcccagtcccgcagct

SEQ ID NO: 6754 - DNA, 20 bp, Artificial Sequence
  Description of Artificial Sequence: Synthetic oligonucleotide
ccatcccagtcccgcagctg

SEQ ID NO: 6755 - DNA, 20 bp, Artificial Sequence
  Description of Artificial Sequence: Synthetic oligonucleotide
catcccagtcccgcagctgc

SEQ ID NO: 6756 - DNA, 20 bp, Artificial Sequence
  Description of Artificial Sequence: Synthetic oligonucleotide
atcccagtcccgcagctgca

SEQ ID NO: 6757 - DNA, 20 bp, Artificial Sequence
  Description of Artificial Sequence: Synthetic oligonucleotide
tcccagtcccgcagctgcac

SEQ ID NO: 6758 - DNA, 20 bp, Artificial Sequence
  Description of Artificial Sequence: Synthetic oligonucleotide
cccagtcccgcagctgcacg

SEQ ID NO: 6759 - DNA, 20 bp, Artificial Sequence
  Description of Artificial Sequence: Synthetic oligonucleotide
ccagtcccgcagctgcacgg

SEQ ID NO: 6760 - DNA, 20 bp, Artificial Sequence
  Description of Artificial Sequence: Synthetic oligonucleotide
cagtcccgcagctgcacggc

SEQ ID NO: 6761 - DNA, 20 bp, Artificial Sequence
  Description of Artificial Sequence: Synthetic oligonucleotide
agtcccgcagctgcacggcc

SEQ ID NO: 6762 - DNA, 20 bp, Artificial Sequence
  Description of Artificial Sequence: Synthetic oligonucleotide
gtcccgcagctgcacggcca

SEQ ID NO: 6763 - DNA, 20 bp, Artificial Sequence
  Description of Artificial Sequence: Synthetic oligonucleotide
tcccgcagctgcacggccag

SEQ ID NO: 6764 - DNA, 20 bp, Artificial Sequence
  Description of Artificial Sequence: Synthetic oligonucleotide
cccgcagctgcacggccagg

SEQ ID NO: 6765 - DNA, 20 bp, Artificial Sequence
  Description of Artificial Sequence: Synthetic oligonucleotide
ccgcagctgcacggccaggc

SEQ ID NO: 6766 - DNA, 20 bp, Artificial Sequence
  Description of Artificial Sequence: Synthetic oligonucleotide
cgcagctgcacggccaggcg

SEQ ID NO: 6767 - DNA, 20 bp, Artificial Sequence
  Description of Artificial Sequence: Synthetic oligonucleotide
gcagctgcacggccaggcgg

SEQ ID NO: 6768 - DNA, 20 bp, Artificial Sequence
  Description of Artificial Sequence: Synthetic oligonucleotide
cagctgcacggccaggcggc

SEQ ID NO: 6769 - DNA, 20 bp, Artificial Sequence
  Description of Artificial Sequence: Synthetic oligonucleotide
agctgcacggccaggcggct

SEQ ID NO: 6770 - DNA, 20 bp, Artificial Sequence
  Description of Artificial Sequence: Synthetic oligonucleotide
gctgcacggccaggcggctg

SEQ ID NO: 6771 - DNA, 20 bp, Artificial Sequence
  Description of Artificial Sequence: Synthetic oligonucleotide
ctgcacggccaggcggctgt

SEQ ID NO: 6772 - DNA, 20 bp, Artificial Sequence
  Description of Artificial Sequence: Synthetic oligonucleotide
tgcacggccaggcggctgtt

SEQ ID NO: 6773 - DNA, 20 bp, Artificial Sequence
  Description of Artificial Sequence: Synthetic oligonucleotide
gcacggccaggcggctgttg

SEQ ID NO: 6774 - DNA, 20 bp, Artificial Sequence
  Description of Artificial Sequence: Synthetic oligonucleotide
cacggccaggcggctgttgc

SEQ ID NO: 6775 - DNA, 20 bp, Artificial Sequence
  Description of Artificial Sequence: Synthetic oligonucleotide
acggccaggcggctgttgcg

SEQ ID NO: 6776 - DNA, 20 bp, Artificial Sequence
  Description of Artificial Sequence: Synthetic oligonucleotide
cggccaggcggctgttgcgg

SEQ ID NO: 6777 - DNA, 20 bp, Artificial Sequence
  Description of Artificial Sequence: Synthetic oligonucleotide
ggccaggcggctgttgcggt

SEQ ID NO: 6778 - DNA, 20 bp, Artificial Sequence
  Description of Artificial Sequence: Synthetic oligonucleotide
gccaggcggctgttgcggtc

SEQ ID NO: 6779 - DNA, 20 bp, Artificial Sequence
  Description of Artificial Sequence: Synthetic oligonucleotide
ccaggcggctgttgcggtcc

SEQ ID NO: 6780 - DNA, 20 bp, Artificial Sequence
  Description of Artificial Sequence: Synthetic oligonucleotide
caggcggctgttgcggtccc

SEQ ID NO: 6781 - DNA, 20 bp, Artificial Sequence
  Description of Artificial Sequence: Synthetic oligonucleotide
aggcggctgttgcggtcccc

SEQ ID NO: 6782 - DNA, 20 bp, Artificial Sequence
  Description of Artificial Sequence: Synthetic oligonucleotide
ggcggctgttgcggtccccc

SEQ ID NO: 6783 - DNA, 20 bp, Artificial Sequence
  Description of Artificial Sequence: Synthetic oligonucleotide
gcggctgttgcggtcccccg

SEQ ID NO: 6784 - DNA, 20 bp, Artificial Sequence
  Description of Artificial Sequence: Synthetic oligonucleotide
cggctgttgcggtcccccgt

SEQ ID NO: 6785 - DNA, 20 bp, Artificial Sequence
  Description of Artificial Sequence: Synthetic oligonucleotide
ggctgttgcggtcccccgtg

SEQ ID NO: 6786 - DNA, 20 bp, Artificial Sequence
  Description of Artificial Sequence: Synthetic oligonucleotide
gctgttgcggtcccccgtga

SEQ ID NO: 6787 - DNA, 20 bp, Artificial Sequence
  Description of Artificial Sequence: Synthetic oligonucleotide
ctgttgcggtcccccgtgat

SEQ ID NO: 6788 - DNA, 20 bp, Artificial Sequence
  Description of Artificial Sequence: Synthetic oligonucleotide
tgttgcggtcccccgtgatg

SEQ ID NO: 6789 - DNA, 20 bp, Artificial Sequence
  Description of Artificial Sequence: Synthetic oligonucleotide
gttgcggtcccccgtgatgc

SEQ ID NO: 6790 - DNA, 20 bp, Artificial Sequence
  Description of Artificial Sequence: Synthetic oligonucleotide
ttgcggtcccccgtgatgct

SEQ ID NO: 6791 - DNA, 20 bp, Artificial Sequence
  Description of Artificial Sequence: Synthetic oligonucleotide
tgcggtcccccgtgatgcta

SEQ ID NO: 6792 - DNA, 20 bp, Artificial Sequence
  Description of Artificial Sequence: Synthetic oligonucleotide
gcggtcccccgtgatgctat

SEQ ID NO: 6793 - DNA, 20 bp, Artificial Sequence
  Description of Artificial Sequence: Synthetic oligonucleotide
cggtcccccgtgatgctatg

SEQ ID NO: 6794 - DNA, 20 bp, Artificial Sequence
  Description of Artificial Sequence: Synthetic oligonucleotide
ggtcccccgtgatgctatgc

SEQ ID NO: 6795 - DNA, 20 bp, Artificial Sequence
  Description of Artificial Sequence: Synthetic oligonucleotide
gtcccccgtgatgctatgca

SEQ ID NO: 6796 - DNA, 20 bp, Artificial Sequence
  Description of Artificial Sequence: Synthetic oligonucleotide
tcccccgtgatgctatgcac

SEQ ID NO: 6797 - DNA, 20 bp, Artificial Sequence
  Description of Artificial Sequence: Synthetic oligonucleotide
cccccgtgatgctatgcacc

SEQ ID NO: 6798 - DNA, 20 bp, Artificial Sequence
  Description of Artificial Sequence: Synthetic oligonucleotide
ccccgtgatgctatgcacct

SEQ ID NO: 6799 - DNA, 20 bp, Artificial Sequence
  Description of Artificial Sequence: Synthetic oligonucleotide
cccgtgatgctatgcacctt

SEQ ID NO: 6800 - DNA, 20 bp, Artificial Sequence
  Description of Artificial Sequence: Synthetic oligonucleotide
ccgtgatgctatgcaccttc

SEQ ID NO: 6801 - DNA, 20 bp, Artificial Sequence
  Description of Artificial Sequence: Synthetic oligonucleotide
cgtgatgctatgcaccttct

SEQ ID NO: 6802 - DNA, 20 bp, Artificial Sequence
  Description of Artificial Sequence: Synthetic oligonucleotide
gtgatgctatgcaccttctc

SEQ ID NO: 6803 - DNA, 20 bp, Artificial Sequence
  Description of Artificial Sequence: Synthetic oligonucleotide
tgatgctatgcaccttctcc

SEQ ID NO: 6804 - DNA, 20 bp, Artificial Sequence
  Description of Artificial Sequence: Synthetic oligonucleotide
gatgctatgcaccttctcca

SEQ ID NO: 6805 - DNA, 20 bp, Artificial Sequence
  Description of Artificial Sequence: Synthetic oligonucleotide
atgctatgcaccttctccag

SEQ ID NO: 6806 - DNA, 20 bp, Artificial Sequence
  Description of Artificial Sequence: Synthetic oligonucleotide
tgctatgcaccttctccaga

SEQ ID NO: 6807 - DNA, 20 bp, Artificial Sequence
  Description of Artificial Sequence: Synthetic oligonucleotide
gctatgcaccttctccagac

SEQ ID NO: 6808 - DNA, 20 bp, Artificial Sequence
  Description of Artificial Sequence: Synthetic oligonucleotide
ctatgcaccttctccagacc

SEQ ID NO: 6809 - DNA, 20 bp, Artificial Sequence
  Description of Artificial Sequence: Synthetic oligonucleotide
tatgcaccttctccagaccc

SEQ ID NO: 6810 - DNA, 20 bp, Artificial Sequence
  Description of Artificial Sequence: Synthetic oligonucleotide
atgcaccttctccagaccca

SEQ ID NO: 6811 - DNA, 20 bp, Artificial Sequence
  Description of Artificial Sequence: Synthetic oligonucleotide
tgcaccttctccagacccag

SEQ ID NO: 6812 - DNA, 20 bp, Artificial Sequence
  Description of Artificial Sequence: Synthetic oligonucleotide
gcaccttctccagacccagc

SEQ ID NO: 6813 - DNA, 20 bp, Artificial Sequence
  Description of Artificial Sequence: Synthetic oligonucleotide
caccttctccagacccagcc

SEQ ID NO: 6814 - DNA, 20 bp, Artificial Sequence
  Description of Artificial Sequence: Synthetic oligonucleotide
accttctccagacccagcca

SEQ ID NO: 6815 - DNA, 20 bp, Artificial Sequence
  Description of Artificial Sequence: Synthetic oligonucleotide
ccttctccagacccagccag

SEQ ID NO: 6816 - DNA, 20 bp, Artificial Sequence
  Description of Artificial Sequence: Synthetic oligonucleotide
cttctccagacccagccaga

SEQ ID NO: 6817 - DNA, 20 bp, Artificial Sequence
  Description of Artificial Sequence: Synthetic oligonucleotide
ttctccagacccagccagaa

SEQ ID NO: 6818 - DNA, 20 bp, Artificial Sequence
  Description of Artificial Sequence: Synthetic oligonucleotide
tctccagacccagccagaac

SEQ ID NO: 6819 - DNA, 20 bp, Artificial Sequence
  Description of Artificial Sequence: Synthetic oligonucleotide
ctccagacccagccagaact

SEQ ID NO: 6820 - DNA, 20 bp, Artificial Sequence
  Description of Artificial Sequence: Synthetic oligonucleotide
tccagacccagccagaactc

SEQ ID NO: 6821 - DNA, 20 bp, Artificial Sequence
  Description of Artificial Sequence: Synthetic oligonucleotide
ccagacccagccagaactcg

SEQ ID NO: 6822 - DNA, 20 bp, Artificial Sequence
  Description of Artificial Sequence: Synthetic oligonucleotide
cagacccagccagaactcgc

SEQ ID NO: 6823 - DNA, 20 bp, Artificial Sequence
  Description of Artificial Sequence: Synthetic oligonucleotide
agacccagccagaactcgcc

SEQ ID NO: 6824 - DNA, 20 bp, Artificial Sequence
  Description of Artificial Sequence: Synthetic oligonucleotide
gacccagccagaactcgcct

SEQ ID NO: 6825 - DNA, 20 bp, Artificial Sequence
  Description of Artificial Sequence: Synthetic oligonucleotide
acccagccagaactcgcctg

SEQ ID NO: 6826 - DNA, 20 bp, Artificial Sequence
  Description of Artificial Sequence: Synthetic oligonucleotide
cccagccagaactcgcctgg

SEQ ID NO: 6827 - DNA, 20 bp, Artificial Sequence
  Description of Artificial Sequence: Synthetic oligonucleotide
ccagccagaactcgcctgga

SEQ ID NO: 6828 - DNA, 20 bp, Artificial Sequence
  Description of Artificial Sequence: Synthetic oligonucleotide
cagccagaactcgcctggag

SEQ ID NO: 6829 - DNA, 20 bp, Artificial Sequence
  Description of Artificial Sequence: Synthetic oligonucleotide
agccagaactcgcctggagt

SEQ ID NO: 6830 - DNA, 20 bp, Artificial Sequence
  Description of Artificial Sequence: Synthetic oligonucleotide
gccagaactcgcctggagtg

SEQ ID NO: 6831 - DNA, 20 bp, Artificial Sequence
  Description of Artificial Sequence: Synthetic oligonucleotide
ccagaactcgcctggagtgg

SEQ ID NO: 6832 - DNA, 20 bp, Artificial Sequence
  Description of Artificial Sequence: Synthetic oligonucleotide
cagaactcgcctggagtggg

SEQ ID NO: 6833 - DNA, 20 bp, Artificial Sequence
  Description of Artificial Sequence: Synthetic oligonucleotide
agaactcgcctggagtggga

SEQ ID NO: 6834 - DNA, 20 bp, Artificial Sequence
  Description of Artificial Sequence: Synthetic oligonucleotide
gaactcgcctggagtgggag

SEQ ID NO: 6835 - DNA, 20 bp, Artificial Sequence
  Description of Artificial Sequence: Synthetic oligonucleotide
aactcgcctggagtgggaga

SEQ ID NO: 6836 - DNA, 20 bp, Artificial Sequence
  Description of Artificial Sequence: Synthetic oligonucleotide
actcgcctggagtgggagag

SEQ ID NO: 6837 - DNA, 20 bp, Artificial Sequence
  Description of Artificial Sequence: Synthetic oligonucleotide
ctcgcctggagtgggagagg

SEQ ID NO: 6838 - DNA, 20 bp, Artificial Sequence
  Description of Artificial Sequence: Synthetic oligonucleotide
tcgcctggagtgggagaggc

SEQ ID NO: 6839 - DNA, 20 bp, Artificial Sequence
  Description of Artificial Sequence: Synthetic oligonucleotide
cgcctggagtgggagaggcc

SEQ ID NO: 6840 - DNA, 20 bp, Artificial Sequence
  Description of Artificial Sequence: Synthetic oligonucleotide
gcctggagtgggagaggcca

SEQ ID NO: 6841 - DNA, 20 bp, Artificial Sequence
  Description of Artificial Sequence: Synthetic oligonucleotide
cctggagtgggagaggccac

SEQ ID NO: 6842 - DNA, 20 bp, Artificial Sequence
  Description of Artificial Sequence: Synthetic oligonucleotide
ctggagtgggagaggccact

SEQ ID NO: 6843 - DNA, 20 bp, Artificial Sequence
  Description of Artificial Sequence: Synthetic oligonucleotide
tggagtgggagaggccactc

SEQ ID NO: 6844 - DNA, 20 bp, Artificial Sequence
  Description of Artificial Sequence: Synthetic oligonucleotide
ggagtgggagaggccactcc

SEQ ID NO: 6845 - DNA, 20 bp, Artificial Sequence
  Description of Artificial Sequence: Synthetic oligonucleotide
gagtgggagaggccactcca

SEQ ID NO: 6846 - DNA, 20 bp, Artificial Sequence
  Description of Artificial Sequence: Synthetic oligonucleotide
agtgggagaggccactccat

SEQ ID NO: 6847 - DNA, 20 bp, Artificial Sequence
  Description of Artificial Sequence: Synthetic oligonucleotide
gtgggagaggccactccatg

SEQ ID NO: 6848 - DNA, 20 bp, Artificial Sequence
  Description of Artificial Sequence: Synthetic oligonucleotide
tgggagaggccactccatga

SEQ ID NO: 6849 - DNA, 20 bp, Artificial Sequence
  Description of Artificial Sequence: Synthetic oligonucleotide
gggagaggccactccatgag

SEQ ID NO: 6850 - DNA, 20 bp, Artificial Sequence
  Description of Artificial Sequence: Synthetic oligonucleotide
ggagaggccactccatgagg

SEQ ID NO: 6851 - DNA, 20 bp, Artificial Sequence
  Description of Artificial Sequence: Synthetic oligonucleotide
gagaggccactccatgaggc

SEQ ID NO: 6852 - DNA, 20 bp, Artificial Sequence
  Description of Artificial Sequence: Synthetic oligonucleotide
agaggccactccatgaggca

SEQ ID NO: 6853 - DNA, 20 bp, Artificial Sequence
  Description of Artificial Sequence: Synthetic oligonucleotide
gaggccactccatgaggcag

SEQ ID NO: 6854 - DNA, 20 bp, Artificial Sequence
  Description of Artificial Sequence: Synthetic oligonucleotide
aggccactccatgaggcagg

SEQ ID NO: 6855 - DNA, 20 bp, Artificial Sequence
  Description of Artificial Sequence: Synthetic oligonucleotide
ggccactccatgaggcaggg

SEQ ID NO: 6856 - DNA, 20 bp, Artificial Sequence
  Description of Artificial Sequence: Synthetic oligonucleotide
gccactccatgaggcagggc

SEQ ID NO: 6857 - DNA, 20 bp, Artificial Sequence
  Description of Artificial Sequence: Synthetic oligonucleotide
ccactccatgaggcagggcc

SEQ ID NO: 6858 - DNA, 20 bp, Artificial Sequence
  Description of Artificial Sequence: Synthetic oligonucleotide
cactccatgaggcagggcca

SEQ ID NO: 6859 - DNA, 20 bp, Artificial Sequence
  Description of Artificial Sequence: Synthetic oligonucleotide
actccatgaggcagggccac

SEQ ID NO: 6860 - DNA, 20 bp, Artificial Sequence
  Description of Artificial Sequence: Synthetic oligonucleotide
ctccatgaggcagggccact

SEQ ID NO: 6861 - DNA, 20 bp, Artificial Sequence
  Description of Artificial Sequence: Synthetic oligonucleotide
tccatgaggcagggccactt

SEQ ID NO: 6862 - DNA, 20 bp, Artificial Sequence
  Description of Artificial Sequence: Synthetic oligonucleotide
ccatgaggcagggccacttc

SEQ ID NO: 6863 - DNA, 20 bp, Artificial Sequence
  Description of Artificial Sequence: Synthetic oligonucleotide
catgaggcagggccacttct

SEQ ID NO: 6864 - DNA, 20 bp, Artificial Sequence
  Description of Artificial Sequence: Synthetic oligonucleotide
atgaggcagggccacttctg

SEQ ID NO: 6865 - DNA, 20 bp, Artificial Sequence
  Description of Artificial Sequence: Synthetic oligonucleotide
tgaggcagggccacttctga

SEQ ID NO: 6866 - DNA, 20 bp, Artificial Sequence
  Description of Artificial Sequence: Synthetic oligonucleotide
gaggcagggccacttctgag

SEQ ID NO: 6867 - DNA, 20 bp, Artificial Sequence
  Description of Artificial Sequence: Synthetic oligonucleotide
aggcagggccacttctgagg

SEQ ID NO: 6868 - DNA, 20 bp, Artificial Sequence
  Description of Artificial Sequence: Synthetic oligonucleotide
ggcagggccacttctgaggg

SEQ ID NO: 6869 - DNA, 20 bp, Artificial Sequence
  Description of Artificial Sequence: Synthetic oligonucleotide
gcagggccacttctgagggt

SEQ ID NO: 6870 - DNA, 20 bp, Artificial Sequence
  Description of Artificial Sequence: Synthetic oligonucleotide
cagggccacttctgagggtc

SEQ ID NO: 6871 - DNA, 20 bp, Artificial Sequence
  Description of Artificial Sequence: Synthetic oligonucleotide
agggccacttctgagggtcc

SEQ ID NO: 6872 - DNA, 20 bp, Artificial Sequence
  Description of Artificial Sequence: Synthetic oligonucleotide
gggccacttctgagggtccc

SEQ ID NO: 6873 - DNA, 20 bp, Artificial Sequence
  Description of Artificial Sequence: Synthetic oligonucleotide
ggccacttctgagggtccct

SEQ ID NO: 6874 - DNA, 20 bp, Artificial Sequence
  Description of Artificial Sequence: Synthetic oligonucleotide
gccacttctgagggtccctc

SEQ ID NO: 6875 - DNA, 20 bp, Artificial Sequence
  Description of Artificial Sequence: Synthetic oligonucleotide
ccacttctgagggtccctct

SEQ ID NO: 6876 - DNA, 20 bp, Artificial Sequence
  Description of Artificial Sequence: Synthetic oligonucleotide
cacttctgagggtccctctt

SEQ ID NO: 6877 - DNA, 20 bp, Artificial Sequence
  Description of Artificial Sequence: Synthetic oligonucleotide
acttctgagggtccctcttc

SEQ ID NO: 6878 - DNA, 20 bp, Artificial Sequence
  Description of Artificial Sequence: Synthetic oligonucleotide
cttctgagggtccctcttcc

SEQ ID NO: 6879 - DNA, 20 bp, Artificial Sequence
  Description of Artificial Sequence: Synthetic oligonucleotide
ttctgagggtccctcttcct

SEQ ID NO: 6880 - DNA, 20 bp, Artificial Sequence
  Description of Artificial Sequence: Synthetic oligonucleotide
tctgagggtccctcttcctc

SEQ ID NO: 6881 - DNA, 20 bp, Artificial Sequence
  Description of Artificial Sequence: Synthetic oligonucleotide
ctgagggtccctcttcctcc

SEQ ID NO: 6882 - DNA, 20 bp, Artificial Sequence
  Description of Artificial Sequence: Synthetic oligonucleotide
tgagggtccctcttcctccc

SEQ ID NO: 6883 - DNA, 20 bp, Artificial Sequence
  Description of Artificial Sequence: Synthetic oligonucleotide
gagggtccctcttcctcccc

SEQ ID NO: 6884 - DNA, 20 bp, Artificial Sequence
  Description of Artificial Sequence: Synthetic oligonucleotide
agggtccctcttcctcccct

SEQ ID NO: 6885 - DNA, 20 bp, Artificial Sequence
  Description of Artificial Sequence: Synthetic oligonucleotide
gggtccctcttcctcccctg

SEQ ID NO: 6886 - DNA, 20 bp, Artificial Sequence
  Description of Artificial Sequence: Synthetic oligonucleotide
ggtccctcttcctcccctgc

SEQ ID NO: 6887 - DNA, 20 bp, Artificial Sequence
  Description of Artificial Sequence: Synthetic oligonucleotide
gtccctcttcctcccctgcc

SEQ ID NO: 6888 - DNA, 20 bp, Artificial Sequence
  Description of Artificial Sequence: Synthetic oligonucleotide
tccctcttcctcccctgcct

SEQ ID NO: 6889 - DNA, 20 bp, Artificial Sequence
  Description of Artificial Sequence: Synthetic oligonucleotide
ccctcttcctcccctgcctc

SEQ ID NO: 6890 - DNA, 20 bp, Artificial Sequence
  Description of Artificial Sequence: Synthetic oligonucleotide
cctcttcctcccctgcctct

SEQ ID NO: 6891 - DNA, 20 bp, Artificial Sequence
  Description of Artificial Sequence: Synthetic oligonucleotide
ctcttcctcccctgcctctg

SEQ ID NO: 6892 - DNA, 20 bp, Artificial Sequence
  Description of Artificial Sequence: Synthetic oligonucleotide
tcttcctcccctgcctctgt

SEQ ID NO: 6893 - DNA, 20 bp, Artificial Sequence
  Description of Artificial Sequence: Synthetic oligonucleotide
cttcctcccctgcctctgtc

SEQ ID NO: 6894 - DNA, 20 bp, Artificial Sequence
  Description of Artificial Sequence: Synthetic oligonucleotide
ttcctcccctgcctctgtcc

SEQ ID NO: 6895 - DNA, 20 bp, Artificial Sequence
  Description of Artificial Sequence: Synthetic oligonucleotide
tcctcccctgcctctgtccc

SEQ ID NO: 6896 - DNA, 20 bp, Artificial Sequence
  Description of Artificial Sequence: Synthetic oligonucleotide
cctcccctgcctctgtcccc

SEQ ID NO: 6897 - DNA, 20 bp, Artificial Sequence
  Description of Artificial Sequence: Synthetic oligonucleotide
ctcccctgcctctgtcccca

SEQ ID NO: 6898 - DNA, 20 bp, Artificial Sequence
  Description of Artificial Sequence: Synthetic oligonucleotide
tcccctgcctctgtccccac

SEQ ID NO: 6899 - DNA, 20 bp, Artificial Sequence
  Description of Artificial Sequence: Synthetic oligonucleotide
cccctgcctctgtccccact

SEQ ID NO: 6900 - DNA, 20 bp, Artificial Sequence
  Description of Artificial Sequence: Synthetic oligonucleotide
ccctgcctctgtccccacta

SEQ ID NO: 6901 - DNA, 20 bp, Artificial Sequence
  Description of Artificial Sequence: Synthetic oligonucleotide
cctgcctctgtccccactag

SEQ ID NO: 6902 - DNA, 20 bp, Artificial Sequence
  Description of Artificial Sequence: Synthetic oligonucleotide
ctgcctctgtccccactaga

SEQ ID NO: 6903 - DNA, 20 bp, Artificial Sequence
  Description of Artificial Sequence: Synthetic oligonucleotide
tgcctctgtccccactagaa

SEQ ID NO: 6904 - DNA, 20 bp, Artificial Sequence
  Description of Artificial Sequence: Synthetic oligonucleotide
gcctctgtccccactagaaa

SEQ ID NO: 6905 - DNA, 20 bp, Artificial Sequence
  Description of Artificial Sequence: Synthetic oligonucleotide
cctctgtccccactagaaac

SEQ ID NO: 6906 - DNA, 20 bp, Artificial Sequence
  Description of Artificial Sequence: Synthetic oligonucleotide
ctctgtccccactagaaaca

SEQ ID NO: 6907 - DNA, 20 bp, Artificial Sequence
  Description of Artificial Sequence: Synthetic oligonucleotide
tctgtccccactagaaacac

SEQ ID NO: 6908 - DNA, 20 bp, Artificial Sequence
  Description of Artificial Sequence: Synthetic oligonucleotide
ctgtccccactagaaacacc

SEQ ID NO: 6909 - DNA, 20 bp, Artificial Sequence
  Description of Artificial Sequence: Synthetic oligonucleotide
tgtccccactagaaacacct

SEQ ID NO: 6910 - DNA, 20 bp, Artificial Sequence
  Description of Artificial Sequence: Synthetic oligonucleotide
gtccccactagaaacaccta

SEQ ID NO: 6911 - DNA, 20 bp, Artificial Sequence
  Description of Artificial Sequence: Synthetic oligonucleotide
tccccactagaaacacctac

SEQ ID NO: 6912 - DNA, 20 bp, Artificial Sequence
  Description of Artificial Sequence: Synthetic oligonucleotide
ccccactagaaacacctacc

SEQ ID NO: 6913 - DNA, 20 bp, Artificial Sequence
  Description of Artificial Sequence: Synthetic oligonucleotide
cccactagaaacacctaccg

SEQ ID NO: 6914 - DNA, 20 bp, Artificial Sequence
  Description of Artificial Sequence: Synthetic oligonucleotide
ccactagaaacacctaccgt

SEQ ID NO: 6915 - DNA, 20 bp, Artificial Sequence
  Description of Artificial Sequence: Synthetic oligonucleotide
cactagaaacacctaccgtg

SEQ ID NO: 6916 - DNA, 20 bp, Artificial Sequence
  Description of Artificial Sequence: Synthetic oligonucleotide
actagaaacacctaccgtgg

SEQ ID NO: 6917 - DNA, 20 bp, Artificial Sequence
  Description of Artificial Sequence: Synthetic oligonucleotide
ctagaaacacctaccgtggg

SEQ ID NO: 6918 - DNA, 20 bp, Artificial Sequence
  Description of Artificial Sequence: Synthetic oligonucleotide
tagaaacacctaccgtgggg

SEQ ID NO: 6919 - DNA, 20 bp, Artificial Sequence
  Description of Artificial Sequence: Synthetic oligonucleotide
agaaacacctaccgtgggga

SEQ ID NO: 6920 - DNA, 20 bp, Artificial Sequence
  Description of Artificial Sequence: Synthetic oligonucleotide
gaaacacctaccgtggggat

SEQ ID NO: 6921 - DNA, 20 bp, Artificial Sequence
  Description of Artificial Sequence: Synthetic oligonucleotide
aaacacctaccgtggggatc

SEQ ID NO: 6922 - DNA, 20 bp, Artificial Sequence
  Description of Artificial Sequence: Synthetic oligonucleotide
aacacctaccgtggggatcc

SEQ ID NO: 6923 - DNA, 20 bp, Artificial Sequence
  Description of Artificial Sequence: Synthetic oligonucleotide
acacctaccgtggggatccc

SEQ ID NO: 6924 - DNA, 20 bp, Artificial Sequence
  Description of Artificial Sequence: Synthetic oligonucleotide
cacctaccgtggggatcccc

SEQ ID NO: 6925 - DNA, 20 bp, Artificial Sequence
  Description of Artificial Sequence: Synthetic oligonucleotide
acctaccgtggggatcccca

SEQ ID NO: 6926 - DNA, 20 bp, Artificial Sequence
  Description of Artificial Sequence: Synthetic oligonucleotide
cctaccgtggggatccccaa

SEQ ID NO: 6927 - DNA, 20 bp, Artificial Sequence
  Description of Artificial Sequence: Synthetic oligonucleotide
ctaccgtggggatccccaaa

SEQ ID NO: 6928 - DNA, 20 bp, Artificial Sequence
  Description of Artificial Sequence: Synthetic oligonucleotide
taccgtggggatccccaaac

SEQ ID NO: 6929 - DNA, 20 bp, Artificial Sequence
  Description of Artificial Sequence: Synthetic oligonucleotide
accgtggggatccccaaacc

SEQ ID NO: 6930 - DNA, 20 bp, Artificial Sequence
  Description of Artificial Sequence: Synthetic oligonucleotide
ccgtggggatccccaaaccc

SEQ ID NO: 6931 - DNA, 20 bp, Artificial Sequence
  Description of Artificial Sequence: Synthetic oligonucleotide
cgtggggatccccaaacccc

SEQ ID NO: 6932 - DNA, 20 bp, Artificial Sequence
  Description of Artificial Sequence: Synthetic oligonucleotide
gtggggatccccaaaccccg

SEQ ID NO: 6933 - DNA, 20 bp, Artificial Sequence
  Description of Artificial Sequence: Synthetic oligonucleotide
tggggatccccaaaccccgc

SEQ ID NO: 6934 - DNA, 20 bp, Artificial Sequence
  Description of Artificial Sequence: Synthetic oligonucleotide
ggggatccccaaaccccgcc

SEQ ID NO: 6935 - DNA, 20 bp, Artificial Sequence
  Description of Artificial Sequence: Synthetic oligonucleotide
gggatccccaaaccccgcct

SEQ ID NO: 6936 - DNA, 20 bp, Artificial Sequence
  Description of Artificial Sequence: Synthetic oligonucleotide
ggatccccaaaccccgcctt

SEQ ID NO: 6937 - DNA, 20 bp, Artificial Sequence
  Description of Artificial Sequence: Synthetic oligonucleotide
gatccccaaaccccgccttg

SEQ ID NO: 6938 - DNA, 20 bp, Artificial Sequence
  Description of Artificial Sequence: Synthetic oligonucleotide
atccccaaaccccgccttgt

SEQ ID NO: 6939 - DNA, 20 bp, Artificial Sequence
  Description of Artificial Sequence: Synthetic oligonucleotide
tccccaaaccccgccttgta

SEQ ID NO: 6940 - DNA, 20 bp, Artificial Sequence
  Description of Artificial Sequence: Synthetic oligonucleotide
ccccaaaccccgccttgtag

SEQ ID NO: 6941 - DNA, 20 bp, Artificial Sequence
  Description of Artificial Sequence: Synthetic oligonucleotide
cccaaaccccgccttgtagg

SEQ ID NO: 6942 - DNA, 20 bp, Artificial Sequence
  Description of Artificial Sequence: Synthetic oligonucleotide
ccaaaccccgccttgtaggc

SEQ ID NO: 6943 - DNA, 20 bp, Artificial Sequence
  Description of Artificial Sequence: Synthetic oligonucleotide
caaaccccgccttgtaggct

SEQ ID NO: 6944 - DNA, 20 bp, Artificial Sequence
  Description of Artificial Sequence: Synthetic oligonucleotide
aaaccccgccttgtaggctt

SEQ ID NO: 6945 - DNA, 20 bp, Artificial Sequence
  Description of Artificial Sequence: Synthetic oligonucleotide
aaccccgccttgtaggcttc

SEQ ID NO: 6946 - DNA, 20 bp, Artificial Sequence
  Description of Artificial Sequence: Synthetic oligonucleotide
accccgccttgtaggcttcc

SEQ ID NO: 6947 - DNA, 20 bp, Artificial Sequence
  Description of Artificial Sequence: Synthetic oligonucleotide
ccccgccttgtaggcttccc

SEQ ID NO: 6948 - DNA, 20 bp, Artificial Sequence
  Description of Artificial Sequence: Synthetic oligonucleotide
cccgccttgtaggcttccca

SEQ ID NO: 6949 - DNA, 20 bp, Artificial Sequence
  Description of Artificial Sequence: Synthetic oligonucleotide
ccgccttgtaggcttcccag

SEQ ID NO: 6950 - DNA, 20 bp, Artificial Sequence
  Description of Artificial Sequence: Synthetic oligonucleotide
cgccttgtaggcttcccagg

SEQ ID NO: 6951 - DNA, 20 bp, Artificial Sequence
  Description of Artificial Sequence: Synthetic oligonucleotide
gccttgtaggcttcccaggg

SEQ ID NO: 6952 - DNA, 20 bp, Artificial Sequence
  Description of Artificial Sequence: Synthetic oligonucleotide
ccttgtaggcttcccagggc

SEQ ID NO: 6953 - DNA, 20 bp, Artificial Sequence
  Description of Artificial Sequence: Synthetic oligonucleotide
cttgtaggcttcccagggcc

SEQ ID NO: 6954 - DNA, 20 bp, Artificial Sequence
  Description of Artificial Sequence: Synthetic oligonucleotide
ttgtaggcttcccagggccg

SEQ ID NO: 6955 - DNA, 20 bp, Artificial Sequence
  Description of Artificial Sequence: Synthetic oligonucleotide
tgtaggcttcccagggccgg

SEQ ID NO: 6956 - DNA, 20 bp, Artificial Sequence
  Description of Artificial Sequence: Synthetic oligonucleotide
gtaggcttcccagggccggt

SEQ ID NO: 6957 - DNA, 20 bp, Artificial Sequence
  Description of Artificial Sequence: Synthetic oligonucleotide
taggcttcccagggccggtt

SEQ ID NO: 6958 - DNA, 20 bp, Artificial Sequence
  Description of Artificial Sequence: Synthetic oligonucleotide
aggcttcccagggccggttg

SEQ ID NO: 6959 - DNA, 20 bp, Artificial Sequence
  Description of Artificial Sequence: Synthetic oligonucleotide
ggcttcccagggccggttga

SEQ ID NO: 6960 - DNA, 20 bp, Artificial Sequence
  Description of Artificial Sequence: Synthetic oligonucleotide
gcttcccagggccggttgaa

SEQ ID NO: 6961 - DNA, 20 bp, Artificial Sequence
  Description of Artificial Sequence: Synthetic oligonucleotide
cttcccagggccggttgaag

SEQ ID NO: 6962 - DNA, 20 bp, Artificial Sequence
  Description of Artificial Sequence: Synthetic oligonucleotide
ttcccagggccggttgaagt

SEQ ID NO: 6963 - DNA, 20 bp, Artificial Sequence
  Description of Artificial Sequence: Synthetic oligonucleotide
tcccagggccggttgaagtc

SEQ ID NO: 6964 - DNA, 20 bp, Artificial Sequence
  Description of Artificial Sequence: Synthetic oligonucleotide
cccagggccggttgaagtcc

SEQ ID NO: 6965 - DNA, 20 bp, Artificial Sequence
  Description of Artificial Sequence: Synthetic oligonucleotide
ccagggccggttgaagtcca

SEQ ID NO: 6966 - DNA, 20 bp, Artificial Sequence
  Description of Artificial Sequence: Synthetic oligonucleotide
cagggccggttgaagtccac

SEQ ID NO: 6967 - DNA, 20 bp, Artificial Sequence
  Description of Artificial Sequence: Synthetic oligonucleotide
agggccggttgaagtccact

SEQ ID NO: 6968 - DNA, 20 bp, Artificial Sequence
  Description of Artificial Sequence: Synthetic oligonucleotide
gggccggttgaagtccactg

SEQ ID NO: 6969 - DNA, 20 bp, Artificial Sequence
  Description of Artificial Sequence: Synthetic oligonucleotide
ggccggttgaagtccactga

SEQ ID NO: 6970 - DNA, 20 bp, Artificial Sequence
  Description of Artificial Sequence: Synthetic oligonucleotide
gccggttgaagtccactgag

SEQ ID NO: 6971 - DNA, 20 bp, Artificial Sequence
  Description of Artificial Sequence: Synthetic oligonucleotide
ccggttgaagtccactgagc

SEQ ID NO: 6972 - DNA, 20 bp, Artificial Sequence
  Description of Artificial Sequence: Synthetic oligonucleotide
cggttgaagtccactgagcc

SEQ ID NO: 6973 - DNA, 20 bp, Artificial Sequence
  Description of Artificial Sequence: Synthetic oligonucleotide
ggttgaagtccactgagcca

SEQ ID NO: 6974 - DNA, 20 bp, Artificial Sequence
  Description of Artificial Sequence: Synthetic oligonucleotide
gttgaagtccactgagccat

SEQ ID NO: 6975 - DNA, 20 bp, Artificial Sequence
  Description of Artificial Sequence: Synthetic oligonucleotide
ttgaagtccactgagccatc

SEQ ID NO: 6976 - DNA, 20 bp, Artificial Sequence
  Description of Artificial Sequence: Synthetic oligonucleotide
tgaagtccactgagccatcg

SEQ ID NO: 6977 - DNA, 20 bp, Artificial Sequence
  Description of Artificial Sequence: Synthetic oligonucleotide
gaagtccactgagccatcgt

SEQ ID NO: 6978 - DNA, 20 bp, Artificial Sequence
  Description of Artificial Sequence: Synthetic oligonucleotide
aagtccactgagccatcgtg

SEQ ID NO: 6979 - DNA, 20 bp, Artificial Sequence
  Description of Artificial Sequence: Synthetic oligonucleotide
agtccactgagccatcgtgg

SEQ ID NO: 6980 - DNA, 20 bp, Artificial Sequence
  Description of Artificial Sequence: Synthetic oligonucleotide
gtccactgagccatcgtggc

SEQ ID NO: 6981 - DNA, 20 bp, Artificial Sequence
  Description of Artificial Sequence: Synthetic oligonucleotide
tccactgagccatcgtggcg

SEQ ID NO: 6982 - DNA, 20 bp, Artificial Sequence
  Description of Artificial Sequence: Synthetic oligonucleotide
ccactgagccatcgtggcgc

SEQ ID NO: 6983 - DNA, 20 bp, Artificial Sequence
  Description of Artificial Sequence: Synthetic oligonucleotide
cactgagccatcgtggcgcc

SEQ ID NO: 6984 - DNA, 20 bp, Artificial Sequence
  Description of Artificial Sequence: Synthetic oligonucleotide
actgagccatcgtggcgcct

SEQ ID NO: 6985 - DNA, 20 bp, Artificial Sequence
  Description of Artificial Sequence: Synthetic oligonucleotide
ctgagccatcgtggcgcctc

SEQ ID NO: 6986 - DNA, 20 bp, Artificial Sequence
  Description of Artificial Sequence: Synthetic oligonucleotide
tgagccatcgtggcgcctct

SEQ ID NO: 6987 - DNA, 20 bp, Artificial Sequence
  Description of Artificial Sequence: Synthetic oligonucleotide
gagccatcgtggcgcctctg

SEQ ID NO: 6988 - DNA, 20 bp, Artificial Sequence
  Description of Artificial Sequence: Synthetic oligonucleotide
agccatcgtggcgcctctga

SEQ ID NO: 6989 - DNA, 20 bp, Artificial Sequence
  Description of Artificial Sequence: Synthetic oligonucleotide
gccatcgtggcgcctctgaa

SEQ ID NO: 6990 - DNA, 20 bp, Artificial Sequence
  Description of Artificial Sequence: Synthetic oligonucleotide
ccatcgtggcgcctctgaat

SEQ ID NO: 6991 - DNA, 20 bp, Artificial Sequence
  Description of Artificial Sequence: Synthetic oligonucleotide
catcgtggcgcctctgaatt

SEQ ID NO: 6992 - DNA, 20 bp, Artificial Sequence
  Description of Artificial Sequence: Synthetic oligonucleotide
atcgtggcgcctctgaatta

SEQ ID NO: 6993 - DNA, 20 bp, Artificial Sequence
  Description of Artificial Sequence: Synthetic oligonucleotide
tcgtggcgcctctgaattac

SEQ ID NO: 6994 - DNA, 20 bp, Artificial Sequence
  Description of Artificial Sequence: Synthetic oligonucleotide
cgtggcgcctctgaattact

SEQ ID NO: 6995 - DNA, 20 bp, Artificial Sequence
  Description of Artificial Sequence: Synthetic oligonucleotide
gtggcgcctctgaattactg

SEQ ID NO: 6996 - DNA, 20 bp, Artificial Sequence
  Description of Artificial Sequence: Synthetic oligonucleotide
tggcgcctctgaattactgt

SEQ ID NO: 6997 - DNA, 20 bp, Artificial Sequence
  Description of Artificial Sequence: Synthetic oligonucleotide
ggcgcctctgaattactgtc

SEQ ID NO: 6998 - DNA, 20 bp, Artificial Sequence
  Description of Artificial Sequence: Synthetic oligonucleotide
gcgcctctgaattactgtcc

SEQ ID NO: 6999 - DNA, 20 bp, Artificial Sequence
  Description of Artificial Sequence: Synthetic oligonucleotide
cgcctctgaattactgtcca

SEQ ID NO: 7000 - DNA, 20 bp, Artificial Sequence
  Description of Artificial Sequence: Synthetic oligonucleotide
gcctctgaattactgtccag

SEQ ID NO: 7001 - DNA, 20 bp, Artificial Sequence
  Description of Artificial Sequence: Synthetic oligonucleotide
cctctgaattactgtccagc

SEQ ID NO: 7002 - DNA, 20 bp, Artificial Sequence
  Description of Artificial Sequence: Synthetic oligonucleotide
ctctgaattactgtccagcc

SEQ ID NO: 7003 - DNA, 20 bp, Artificial Sequence
  Description of Artificial Sequence: Synthetic oligonucleotide
tctgaattactgtccagcct

SEQ ID NO: 7004 - DNA, 20 bp, Artificial Sequence
  Description of Artificial Sequence: Synthetic oligonucleotide
ctgaattactgtccagcctc

SEQ ID NO: 7005 - DNA, 20 bp, Artificial Sequence
  Description of Artificial Sequence: Synthetic oligonucleotide
tgaattactgtccagcctcc

SEQ ID NO: 7006 - DNA, 20 bp, Artificial Sequence
  Description of Artificial Sequence: Synthetic oligonucleotide
gaattactgtccagcctcca

SEQ ID NO: 7007 - DNA, 20 bp, Artificial Sequence
  Description of Artificial Sequence: Synthetic oligonucleotide
aattactgtccagcctccat

SEQ ID NO: 7008 - DNA, 20 bp, Artificial Sequence
  Description of Artificial Sequence: Synthetic oligonucleotide
attactgtccagcctccatc

SEQ ID NO: 7009 - DNA, 20 bp, Artificial Sequence
  Description of Artificial Sequence: Synthetic oligonucleotide
ttactgtccagcctccatct

SEQ ID NO: 7010 - DNA, 20 bp, Artificial Sequence
  Description of Artificial Sequence: Synthetic oligonucleotide
tactgtccagcctccatctg

SEQ ID NO: 7011 - DNA, 20 bp, Artificial Sequence
  Description of Artificial Sequence: Synthetic oligonucleotide
actgtccagcctccatctgc

SEQ ID NO: 7012 - DNA, 20 bp, Artificial Sequence
  Description of Artificial Sequence: Synthetic oligonucleotide
ctgtccagcctccatctgcc

SEQ ID NO: 7013 - DNA, 20 bp, Artificial Sequence
  Description of Artificial Sequence: Synthetic oligonucleotide
tgtccagcctccatctgccc

SEQ ID NO: 7014 - DNA, 20 bp, Artificial Sequence
  Description of Artificial Sequence: Synthetic oligonucleotide
gtccagcctccatctgccca

SEQ ID NO: 7015 - DNA, 20 bp, Artificial Sequence
  Description of Artificial Sequence: Synthetic oligonucleotide
tccagcctccatctgcccag

SEQ ID NO: 7016 - DNA, 20 bp, Artificial Sequence
  Description of Artificial Sequence: Synthetic oligonucleotide
ccagcctccatctgcccaga

SEQ ID NO: 7017 - DNA, 20 bp, Artificial Sequence
  Description of Artificial Sequence: Synthetic oligonucleotide
cagcctccatctgcccagaa

SEQ ID NO: 7018 - DNA, 20 bp, Artificial Sequence
  Description of Artificial Sequence: Synthetic oligonucleotide
agcctccatctgcccagaaa

SEQ ID NO: 7019 - DNA, 20 bp, Artificial Sequence
  Description of Artificial Sequence: Synthetic oligonucleotide
gcctccatctgcccagaaag

SEQ ID NO: 7020 - DNA, 20 bp, Artificial Sequence
  Description of Artificial Sequence: Synthetic oligonucleotide
cctccatctgcccagaaagg

SEQ ID NO: 7021 - DNA, 20 bp, Artificial Sequence
  Description of Artificial Sequence: Synthetic oligonucleotide
ctccatctgcccagaaaggt

SEQ ID NO: 7022 - DNA, 20 bp, Artificial Sequence
  Description of Artificial Sequence: Synthetic oligonucleotide
tccatctgcccagaaaggta

SEQ ID NO: 7023 - DNA, 20 bp, Artificial Sequence
  Description of Artificial Sequence: Synthetic oligonucleotide
ccatctgcccagaaaggtac

SEQ ID NO: 7024 - DNA, 20 bp, Artificial Sequence
  Description of Artificial Sequence: Synthetic oligonucleotide
catctgcccagaaaggtaca

SEQ ID NO: 7025 - DNA, 20 bp, Artificial Sequence
  Description of Artificial Sequence: Synthetic oligonucleotide
atctgcccagaaaggtacaa

SEQ ID NO: 7026 - DNA, 20 bp, Artificial Sequence
  Description of Artificial Sequence: Synthetic oligonucleotide
tctgcccagaaaggtacaag

SEQ ID NO: 7027 - DNA, 20 bp, Artificial Sequence
  Description of Artificial Sequence: Synthetic oligonucleotide
ctgcccagaaaggtacaagg

SEQ ID NO: 7028 - DNA, 20 bp, Artificial Sequence
  Description of Artificial Sequence: Synthetic oligonucleotide
tgcccagaaaggtacaaggt

SEQ ID NO: 7029 - DNA, 20 bp, Artificial Sequence
  Description of Artificial Sequence: Synthetic oligonucleotide
gcccagaaaggtacaaggtc

SEQ ID NO: 7030 - DNA, 20 bp, Artificial Sequence
  Description of Artificial Sequence: Synthetic oligonucleotide
cccagaaaggtacaaggtca

SEQ ID NO: 7031 - DNA, 20 bp, Artificial Sequence
  Description of Artificial Sequence: Synthetic oligonucleotide
ccagaaaggtacaaggtcac

SEQ ID NO: 7032 - DNA, 20 bp, Artificial Sequence
  Description of Artificial Sequence: Synthetic oligonucleotide
cagaaaggtacaaggtcacc

SEQ ID NO: 7033 - DNA, 20 bp, Artificial Sequence
  Description of Artificial Sequence: Synthetic oligonucleotide
agaaaggtacaaggtcacca

SEQ ID NO: 7034 - DNA, 20 bp, Artificial Sequence
  Description of Artificial Sequence: Synthetic oligonucleotide
gaaaggtacaaggtcaccag

SEQ ID NO: 7035 - DNA, 20 bp, Artificial Sequence
  Description of Artificial Sequence: Synthetic oligonucleotide
aaaggtacaaggtcaccagg

SEQ ID NO: 7036 - DNA, 20 bp, Artificial Sequence
  Description of Artificial Sequence: Synthetic oligonucleotide
aaggtacaaggtcaccagga

SEQ ID NO: 7037 - DNA, 20 bp, Artificial Sequence
  Description of Artificial Sequence: Synthetic oligonucleotide
aggtacaaggtcaccaggaa

SEQ ID NO: 7038 - DNA, 20 bp, Artificial Sequence
  Description of Artificial Sequence: Synthetic oligonucleotide
ggtacaaggtcaccaggaag

SEQ ID NO: 7039 - DNA, 20 bp, Artificial Sequence
  Description of Artificial Sequence: Synthetic oligonucleotide
gtacaaggtcaccaggaagt

SEQ ID NO: 7040 - DNA, 20 bp, Artificial Sequence
  Description of Artificial Sequence: Synthetic oligonucleotide
tacaaggtcaccaggaagtc

SEQ ID NO: 7041 - DNA, 20 bp, Artificial Sequence
  Description of Artificial Sequence: Synthetic oligonucleotide
acaaggtcaccaggaagtcc

SEQ ID NO: 7042 - DNA, 20 bp, Artificial Sequence
  Description of Artificial Sequence: Synthetic oligonucleotide
caaggtcaccaggaagtccc

SEQ ID NO: 7043 - DNA, 20 bp, Artificial Sequence
  Description of Artificial Sequence: Synthetic oligonucleotide
aaggtcaccaggaagtccct

SEQ ID NO: 7044 - DNA, 20 bp, Artificial Sequence
  Description of Artificial Sequence: Synthetic oligonucleotide
aggtcaccaggaagtccctc

SEQ ID NO: 7045 - DNA, 20 bp, Artificial Sequence
  Description of Artificial Sequence: Synthetic oligonucleotide
ggtcaccaggaagtccctct

SEQ ID NO: 7046 - DNA, 20 bp, Artificial Sequence
  Description of Artificial Sequence: Synthetic oligonucleotide
gtcaccaggaagtccctctt

SEQ ID NO: 7047 - DNA, 20 bp, Artificial Sequence
  Description of Artificial Sequence: Synthetic oligonucleotide
tcaccaggaagtccctcttc

SEQ ID NO: 7048 - DNA, 20 bp, Artificial Sequence
  Description of Artificial Sequence: Synthetic oligonucleotide
caccaggaagtccctcttca

SEQ ID NO: 7049 - DNA, 20 bp, Artificial Sequence
  Description of Artificial Sequence: Synthetic oligonucleotide
accaggaagtccctcttcac

SEQ ID NO: 7050 - DNA, 20 bp, Artificial Sequence
  Description of Artificial Sequence: Synthetic oligonucleotide
ccaggaagtccctcttcaca

SEQ ID NO: 7051 - DNA, 20 bp, Artificial Sequence
  Description of Artificial Sequence: Synthetic oligonucleotide
caggaagtccctcttcacag

SEQ ID NO: 7052 - DNA, 20 bp, Artificial Sequence
  Description of Artificial Sequence: Synthetic oligonucleotide
aggaagtccctcttcacaga

SEQ ID NO: 7053 - DNA, 20 bp, Artificial Sequence
  Description of Artificial Sequence: Synthetic oligonucleotide
ggaagtccctcttcacagac

SEQ ID NO: 7054 - DNA, 20 bp, Artificial Sequence
  Description of Artificial Sequence: Synthetic oligonucleotide
gaagtccctcttcacagacg

SEQ ID NO: 7055 - DNA, 20 bp, Artificial Sequence
  Description of Artificial Sequence: Synthetic oligonucleotide
aagtccctcttcacagacga

SEQ ID NO: 7056 - DNA, 20 bp, Artificial Sequence
  Description of Artificial Sequence: Synthetic oligonucleotide
agtccctcttcacagacgac

SEQ ID NO: 7057 - DNA, 20 bp, Artificial Sequence
  Description of Artificial Sequence: Synthetic oligonucleotide
gtccctcttcacagacgacc

SEQ ID NO: 7058 - DNA, 20 bp, Artificial Sequence
  Description of Artificial Sequence: Synthetic oligonucleotide
tccctcttcacagacgaccc

SEQ ID NO: 7059 - DNA, 20 bp, Artificial Sequence
  Description of Artificial Sequence: Synthetic oligonucleotide
ccctcttcacagacgacccc

SEQ ID NO: 7060 - DNA, 20 bp, Artificial Sequence
  Description of Artificial Sequence: Synthetic oligonucleotide
cctcttcacagacgacccca

SEQ ID NO: 7061 - DNA, 20 bp, Artificial Sequence
  Description of Artificial Sequence: Synthetic oligonucleotide
ctcttcacagacgaccccac

SEQ ID NO: 7062 - DNA, 20 bp, Artificial Sequence
  Description of Artificial Sequence: Synthetic oligonucleotide
tcttcacagacgaccccact

SEQ ID NO: 7063 - DNA, 20 bp, Artificial Sequence
  Description of Artificial Sequence: Synthetic oligonucleotide
cttcacagacgaccccactc

SEQ ID NO: 7064 - DNA, 20 bp, Artificial Sequence
  Description of Artificial Sequence: Synthetic oligonucleotide
ttcacagacgaccccactcc

SEQ ID NO: 7065 - DNA, 20 bp, Artificial Sequence
  Description of Artificial Sequence: Synthetic oligonucleotide
tcacagacgaccccactccc

SEQ ID NO: 7066 - DNA, 20 bp, Artificial Sequence
  Description of Artificial Sequence: Synthetic oligonucleotide
cacagacgaccccactccct

SEQ ID NO: 7067 - DNA, 20 bp, Artificial Sequence
  Description of Artificial Sequence: Synthetic oligonucleotide
acagacgaccccactccctc

SEQ ID NO: 7068 - DNA, 20 bp, Artificial Sequence
  Description of Artificial Sequence: Synthetic oligonucleotide
cagacgaccccactccctca

SEQ ID NO: 7069 - DNA, 20 bp, Artificial Sequence
  Description of Artificial Sequence: Synthetic oligonucleotide
agacgaccccactccctcat

SEQ ID NO: 7070 - DNA, 20 bp, Artificial Sequence
  Description of Artificial Sequence: Synthetic oligonucleotide
gacgaccccactccctcatc

SEQ ID NO: 7071 - DNA, 20 bp, Artificial Sequence
  Description of Artificial Sequence: Synthetic oligonucleotide
acgaccccactccctcatct

SEQ ID NO: 7072 - DNA, 20 bp, Artificial Sequence
  Description of Artificial Sequence: Synthetic oligonucleotide
cgaccccactccctcatctg

SEQ ID NO: 7073 - DNA, 20 bp, Artificial Sequence
  Description of Artificial Sequence: Synthetic oligonucleotide
gaccccactccctcatctgg

SEQ ID NO: 7074 - DNA, 20 bp, Artificial Sequence
  Description of Artificial Sequence: Synthetic oligonucleotide
accccactccctcatctggc

SEQ ID NO: 7075 - DNA, 20 bp, Artificial Sequence
  Description of Artificial Sequence: Synthetic oligonucleotide
ccccactccctcatctggct

SEQ ID NO: 7076 - DNA, 20 bp, Artificial Sequence
  Description of Artificial Sequence: Synthetic oligonucleotide
cccactccctcatctggctg

SEQ ID NO: 7077 - DNA, 20 bp, Artificial Sequence
  Description of Artificial Sequence: Synthetic oligonucleotide
ccactccctcatctggctgc

SEQ ID NO: 7078 - DNA, 20 bp, Artificial Sequence
  Description of Artificial Sequence: Synthetic oligonucleotide
cactccctcatctggctgcc

SEQ ID NO: 7079 - DNA, 20 bp, Artificial Sequence
  Description of Artificial Sequence: Synthetic oligonucleotide
actccctcatctggctgcca

SEQ ID NO: 7080 - DNA, 20 bp, Artificial Sequence
  Description of Artificial Sequence: Synthetic oligonucleotide
ctccctcatctggctgccaa

SEQ ID NO: 7081 - DNA, 20 bp, Artificial Sequence
  Description of Artificial Sequence: Synthetic oligonucleotide
tccctcatctggctgccaag

SEQ ID NO: 7082 - DNA, 20 bp, Artificial Sequence
  Description of Artificial Sequence: Synthetic oligonucleotide
ccctcatctggctgccaagc

SEQ ID NO: 7083 - DNA, 20 bp, Artificial Sequence
  Description of Artificial Sequence: Synthetic oligonucleotide
cctcatctggctgccaagca

SEQ ID NO: 7084 - DNA, 20 bp, Artificial Sequence
  Description of Artificial Sequence: Synthetic oligonucleotide
ctcatctggctgccaagcac

SEQ ID NO: 7085 - DNA, 20 bp, Artificial Sequence
  Description of Artificial Sequence: Synthetic oligonucleotide
tcatctggctgccaagcacc

SEQ ID NO: 7086 - DNA, 20 bp, Artificial Sequence
  Description of Artificial Sequence: Synthetic oligonucleotide
catctggctgccaagcacca

SEQ ID NO: 7087 - DNA, 20 bp, Artificial Sequence
  Description of Artificial Sequence: Synthetic oligonucleotide
atctggctgccaagcaccaa

SEQ ID NO: 7088 - DNA, 20 bp, Artificial Sequence
  Description of Artificial Sequence: Synthetic oligonucleotide
tctggctgccaagcaccaaa

SEQ ID NO: 7089 - DNA, 20 bp, Artificial Sequence
  Description of Artificial Sequence: Synthetic oligonucleotide
ctggctgccaagcaccaaac

SEQ ID NO: 7090 - DNA, 20 bp, Artificial Sequence
  Description of Artificial Sequence: Synthetic oligonucleotide
tggctgccaagcaccaaacc

SEQ ID NO: 7091 - DNA, 20 bp, Artificial Sequence
  Description of Artificial Sequence: Synthetic oligonucleotide
ggctgccaagcaccaaaccc

SEQ ID NO: 7092 - DNA, 20 bp, Artificial Sequence
  Description of Artificial Sequence: Synthetic oligonucleotide
gctgccaagcaccaaacccc

SEQ ID NO: 7093 - DNA, 20 bp, Artificial Sequence
  Description of Artificial Sequence: Synthetic oligonucleotide
ctgccaagcaccaaaccccc

SEQ ID NO: 7094 - DNA, 20 bp, Artificial Sequence
  Description of Artificial Sequence: Synthetic oligonucleotide
tgccaagcaccaaaccccct

SEQ ID NO: 7095 - DNA, 20 bp, Artificial Sequence
  Description of Artificial Sequence: Synthetic oligonucleotide
gccaagcaccaaaccccctc

SEQ ID NO: 7096 - DNA, 20 bp, Artificial Sequence
  Description of Artificial Sequence: Synthetic oligonucleotide
ccaagcaccaaaccccctcc

SEQ ID NO: 7097 - DNA, 20 bp, Artificial Sequence
  Description of Artificial Sequence: Synthetic oligonucleotide
caagcaccaaaccccctcca

SEQ ID NO: 7098 - DNA, 20 bp, Artificial Sequence
  Description of Artificial Sequence: Synthetic oligonucleotide
aagcaccaaaccccctccaa

SEQ ID NO: 7099 - DNA, 20 bp, Artificial Sequence
  Description of Artificial Sequence: Synthetic oligonucleotide
agcaccaaaccccctccaaa

SEQ ID NO: 7100 - DNA, 20 bp, Artificial Sequence
  Description of Artificial Sequence: Synthetic oligonucleotide
gcaccaaaccccctccaaac

SEQ ID NO: 7101 - DNA, 20 bp, Artificial Sequence
  Description of Artificial Sequence: Synthetic oligonucleotide
caccaaaccccctccaaacc

SEQ ID NO: 7102 - DNA, 20 bp, Artificial Sequence
  Description of Artificial Sequence: Synthetic oligonucleotide
accaaaccccctccaaaccc

SEQ ID NO: 7103 - DNA, 20 bp, Artificial Sequence
  Description of Artificial Sequence: Synthetic oligonucleotide
ccaaaccccctccaaaccca

SEQ ID NO: 7104 - DNA, 20 bp, Artificial Sequence
  Description of Artificial Sequence: Synthetic oligonucleotide
caaaccccctccaaacccag

SEQ ID NO: 7105 - DNA, 20 bp, Artificial Sequence
  Description of Artificial Sequence: Synthetic oligonucleotide
aaaccccctccaaacccagg

SEQ ID NO: 7106 - DNA, 20 bp, Artificial Sequence
  Description of Artificial Sequence: Synthetic oligonucleotide
aaccccctccaaacccagga

SEQ ID NO: 7107 - DNA, 20 bp, Artificial Sequence
  Description of Artificial Sequence: Synthetic oligonucleotide
accccctccaaacccaggaa

SEQ ID NO: 7108 - DNA, 20 bp, Artificial Sequence
  Description of Artificial Sequence: Synthetic oligonucleotide
ccccctccaaacccaggaag

SEQ ID NO: 7109 - DNA, 20 bp, Artificial Sequence
  Description of Artificial Sequence: Synthetic oligonucleotide
cccctccaaacccaggaaga

SEQ ID NO: 7110 - DNA, 20 bp, Artificial Sequence
  Description of Artificial Sequence: Synthetic oligonucleotide
ccctccaaacccaggaagac

SEQ ID NO: 7111 - DNA, 20 bp, Artificial Sequence
  Description of Artificial Sequence: Synthetic oligonucleotide
cctccaaacccaggaagaca

SEQ ID NO: 7112 - DNA, 20 bp, Artificial Sequence
  Description of Artificial Sequence: Synthetic oligonucleotide
ctccaaacccaggaagacag

SEQ ID NO: 7113 - DNA, 20 bp, Artificial Sequence
  Description of Artificial Sequence: Synthetic oligonucleotide
tccaaacccaggaagacagc

SEQ ID NO: 7114 - DNA, 20 bp, Artificial Sequence
  Description of Artificial Sequence: Synthetic oligonucleotide
ccaaacccaggaagacagca

SEQ ID NO: 7115 - DNA, 20 bp, Artificial Sequence
  Description of Artificial Sequence: Synthetic oligonucleotide
caaacccaggaagacagcag

SEQ ID NO: 7116 - DNA, 20 bp, Artificial Sequence
  Description of Artificial Sequence: Synthetic oligonucleotide
aaacccaggaagacagcagc

SEQ ID NO: 7117 - DNA, 20 bp, Artificial Sequence
  Description of Artificial Sequence: Synthetic oligonucleotide
aacccaggaagacagcagct

SEQ ID NO: 7118 - DNA, 20 bp, Artificial Sequence
  Description of Artificial Sequence: Synthetic oligonucleotide
acccaggaagacagcagctc

SEQ ID NO: 7119 - DNA, 20 bp, Artificial Sequence
  Description of Artificial Sequence: Synthetic oligonucleotide
cccaggaagacagcagctcc

SEQ ID NO: 7120 - DNA, 20 bp, Artificial Sequence
  Description of Artificial Sequence: Synthetic oligonucleotide
ccaggaagacagcagctccc

SEQ ID NO: 7121 - DNA, 20 bp, Artificial Sequence
  Description of Artificial Sequence: Synthetic oligonucleotide
caggaagacagcagctccct

SEQ ID NO: 7122 - DNA, 20 bp, Artificial Sequence
  Description of Artificial Sequence: Synthetic oligonucleotide
aggaagacagcagctccctc

SEQ ID NO: 7123 - DNA, 20 bp, Artificial Sequence
  Description of Artificial Sequence: Synthetic oligonucleotide
ggaagacagcagctccctca

SEQ ID NO: 7124 - DNA, 20 bp, Artificial Sequence
  Description of Artificial Sequence: Synthetic oligonucleotide
gaagacagcagctccctcac

SEQ ID NO: 7125 - DNA, 20 bp, Artificial Sequence
  Description of Artificial Sequence: Synthetic oligonucleotide
aagacagcagctccctcact

SEQ ID NO: 7126 - DNA, 20 bp, Artificial Sequence
  Description of Artificial Sequence: Synthetic oligonucleotide
agacagcagctccctcactc

SEQ ID NO: 7127 - DNA, 20 bp, Artificial Sequence
  Description of Artificial Sequence: Synthetic oligonucleotide
gacagcagctccctcactca

SEQ ID NO: 7128 - DNA, 20 bp, Artificial Sequence
  Description of Artificial Sequence: Synthetic oligonucleotide
acagcagctccctcactcat

SEQ ID NO: 7129 - DNA, 20 bp, Artificial Sequence
  Description of Artificial Sequence: Synthetic oligonucleotide
cagcagctccctcactcatc

SEQ ID NO: 7130 - DNA, 20 bp, Artificial Sequence
  Description of Artificial Sequence: Synthetic oligonucleotide
agcagctccctcactcatcc

SEQ ID NO: 7131 - DNA, 20 bp, Artificial Sequence
  Description of Artificial Sequence: Synthetic oligonucleotide
gcagctccctcactcatccc

SEQ ID NO: 7132 - DNA, 20 bp, Artificial Sequence
  Description of Artificial Sequence: Synthetic oligonucleotide
cagctccctcactcatccct

SEQ ID NO: 7133 - DNA, 20 bp, Artificial Sequence
  Description of Artificial Sequence: Synthetic oligonucleotide
agctccctcactcatccctg

SEQ ID NO: 7134 - DNA, 20 bp, Artificial Sequence
  Description of Artificial Sequence: Synthetic oligonucleotide
gctccctcactcatccctgg

SEQ ID NO: 7135 - DNA, 20 bp, Artificial Sequence
  Description of Artificial Sequence: Synthetic oligonucleotide
ctccctcactcatccctgga

SEQ ID NO: 7136 - DNA, 20 bp, Artificial Sequence
  Description of Artificial Sequence: Synthetic oligonucleotide
tccctcactcatccctggag

SEQ ID NO: 7137 - DNA, 20 bp, Artificial Sequence
  Description of Artificial Sequence: Synthetic oligonucleotide
ccctcactcatccctggagg

SEQ ID NO: 7138 - DNA, 20 bp, Artificial Sequence
  Description of Artificial Sequence: Synthetic oligonucleotide
cctcactcatccctggagga

SEQ ID NO: 7139 - DNA, 20 bp, Artificial Sequence
  Description of Artificial Sequence: Synthetic oligonucleotide
ctcactcatccctggaggac

SEQ ID NO: 7140 - DNA, 20 bp, Artificial Sequence
  Description of Artificial Sequence: Synthetic oligonucleotide
tcactcatccctggaggact

SEQ ID NO: 7141 - DNA, 20 bp, Artificial Sequence
  Description of Artificial Sequence: Synthetic oligonucleotide
cactcatccctggaggactc

SEQ ID NO: 7142 - DNA, 20 bp, Artificial Sequence
  Description of Artificial Sequence: Synthetic oligonucleotide
actcatccctggaggactcg

SEQ ID NO: 7143 - DNA, 20 bp, Artificial Sequence
  Description of Artificial Sequence: Synthetic oligonucleotide
ctcatccctggaggactcga

SEQ ID NO: 7144 - DNA, 20 bp, Artificial Sequence
  Description of Artificial Sequence: Synthetic oligonucleotide
tcatccctggaggactcgag

SEQ ID NO: 7145 - DNA, 20 bp, Artificial Sequence
  Description of Artificial Sequence: Synthetic oligonucleotide
catccctggaggactcgagg

SEQ ID NO: 7146 - DNA, 20 bp, Artificial Sequence
  Description of Artificial Sequence: Synthetic oligonucleotide
atccctggaggactcgagga

SEQ ID NO: 7147 - DNA, 20 bp, Artificial Sequence
  Description of Artificial Sequence: Synthetic oligonucleotide
tccctggaggactcgaggag

SEQ ID NO: 7148 - DNA, 20 bp, Artificial Sequence
  Description of Artificial Sequence: Synthetic oligonucleotide
ccctggaggactcgaggagg

SEQ ID NO: 7149 - DNA, 20 bp, Artificial Sequence
  Description of Artificial Sequence: Synthetic oligonucleotide
cctggaggactcgaggaggg

SEQ ID NO: 7150 - DNA, 20 bp, Artificial Sequence
  Description of Artificial Sequence: Synthetic oligonucleotide
ctggaggactcgaggagggt

SEQ ID NO: 7151 - DNA, 20 bp, Artificial Sequence
  Description of Artificial Sequence: Synthetic oligonucleotide
tggaggactcgaggagggtg

SEQ ID NO: 7152 - DNA, 20 bp, Artificial Sequence
  Description of Artificial Sequence: Synthetic oligonucleotide
ggaggactcgaggagggtgg

SEQ ID NO: 7153 - DNA, 20 bp, Artificial Sequence
  Description of Artificial Sequence: Synthetic oligonucleotide
gaggactcgaggagggtggg

SEQ ID NO: 7154 - DNA, 20 bp, Artificial Sequence
  Description of Artificial Sequence: Synthetic oligonucleotide
aggactcgaggagggtgggt

SEQ ID NO: 7155 - DNA, 20 bp, Artificial Sequence
  Description of Artificial Sequence: Synthetic oligonucleotide
ggactcgaggagggtgggtc

SEQ ID NO: 7156 - DNA, 20 bp, Artificial Sequence
  Description of Artificial Sequence: Synthetic oligonucleotide
gactcgaggagggtgggtca

SEQ ID NO: 7157 - DNA, 20 bp, Artificial Sequence
  Description of Artificial Sequence: Synthetic oligonucleotide
actcgaggagggtgggtcag

SEQ ID NO: 7158 - DNA, 20 bp, Artificial Sequence
  Description of Artificial Sequence: Synthetic oligonucleotide
ctcgaggagggtgggtcaga

SEQ ID NO: 7159 - DNA, 20 bp, Artificial Sequence
  Description of Artificial Sequence: Synthetic oligonucleotide
tcgaggagggtgggtcagag

SEQ ID NO: 7160 - DNA, 20 bp, Artificial Sequence
  Description of Artificial Sequence: Synthetic oligonucleotide
cgaggagggtgggtcagagg

SEQ ID NO: 7161 - DNA, 20 bp, Artificial Sequence
  Description of Artificial Sequence: Synthetic oligonucleotide
gaggagggtgggtcagaggg

SEQ ID NO: 7162 - DNA, 20 bp, Artificial Sequence
  Description of Artificial Sequence: Synthetic oligonucleotide
aggagggtgggtcagaggga

SEQ ID NO: 7163 - DNA, 20 bp, Artificial Sequence
  Description of Artificial Sequence: Synthetic oligonucleotide
ggagggtgggtcagagggag

SEQ ID NO: 7164 - DNA, 20 bp, Artificial Sequence
  Description of Artificial Sequence: Synthetic oligonucleotide
gagggtgggtcagagggagg

SEQ ID NO: 7165 - DNA, 20 bp, Artificial Sequence
  Description of Artificial Sequence: Synthetic oligonucleotide
agggtgggtcagagggagga

SEQ ID NO: 7166 - DNA, 20 bp, Artificial Sequence
  Description of Artificial Sequence: Synthetic oligonucleotide
gggtgggtcagagggaggaa

SEQ ID NO: 7167 - DNA, 20 bp, Artificial Sequence
  Description of Artificial Sequence: Synthetic oligonucleotide
ggtgggtcagagggaggaat

SEQ ID NO: 7168 - DNA, 20 bp, Artificial Sequence
  Description of Artificial Sequence: Synthetic oligonucleotide
gtgggtcagagggaggaata

SEQ ID NO: 7169 - DNA, 20 bp, Artificial Sequence
  Description of Artificial Sequence: Synthetic oligonucleotide
tgggtcagagggaggaatat

SEQ ID NO: 7170 - DNA, 20 bp, Artificial Sequence
  Description of Artificial Sequence: Synthetic oligonucleotide
gggtcagagggaggaatatt

SEQ ID NO: 7171 - DNA, 20 bp, Artificial Sequence
  Description of Artificial Sequence: Synthetic oligonucleotide
ggtcagagggaggaatatta

SEQ ID NO: 7172 - DNA, 20 bp, Artificial Sequence
  Description of Artificial Sequence: Synthetic oligonucleotide
gtcagagggaggaatattat

SEQ ID NO: 7173 - DNA, 20 bp, Artificial Sequence
  Description of Artificial Sequence: Synthetic oligonucleotide
tcagagggaggaatattatg

SEQ ID NO: 7174 - DNA, 20 bp, Artificial Sequence
  Description of Artificial Sequence: Synthetic oligonucleotide
cagagggaggaatattatgg

SEQ ID NO: 7175 - DNA, 20 bp, Artificial Sequence
  Description of Artificial Sequence: Synthetic oligonucleotide
agagggaggaatattatggg

SEQ ID NO: 7176 - DNA, 20 bp, Artificial Sequence
  Description of Artificial Sequence: Synthetic oligonucleotide
gagggaggaatattatgggc

SEQ ID NO: 7177 - DNA, 20 bp, Artificial Sequence
  Description of Artificial Sequence: Synthetic oligonucleotide
agggaggaatattatgggct

SEQ ID NO: 7178 - DNA, 20 bp, Artificial Sequence
  Description of Artificial Sequence: Synthetic oligonucleotide
gggaggaatattatgggctg

SEQ ID NO: 7179 - DNA, 20 bp, Artificial Sequence
  Description of Artificial Sequence: Synthetic oligonucleotide
ggaggaatattatgggctgg

SEQ ID NO: 7180 - DNA, 20 bp, Artificial Sequence
  Description of Artificial Sequence: Synthetic oligonucleotide
gaggaatattatgggctggc

SEQ ID NO: 7181 - DNA, 20 bp, Artificial Sequence
  Description of Artificial Sequence: Synthetic oligonucleotide
aggaatattatgggctggcc

SEQ ID NO: 7182 - DNA, 20 bp, Artificial Sequence
  Description of Artificial Sequence: Synthetic oligonucleotide
ggaatattatgggctggcct

SEQ ID NO: 7183 - DNA, 20 bp, Artificial Sequence
  Description of Artificial Sequence: Synthetic oligonucleotide
gaatattatgggctggcctt

SEQ ID NO: 7184 - DNA, 20 bp, Artificial Sequence
  Description of Artificial Sequence: Synthetic oligonucleotide
aatattatgggctggccttg

SEQ ID NO: 7185 - DNA, 20 bp, Artificial Sequence
  Description of Artificial Sequence: Synthetic oligonucleotide
atattatgggctggccttgg

SEQ ID NO: 7186 - DNA, 20 bp, Artificial Sequence
  Description of Artificial Sequence: Synthetic oligonucleotide
tattatgggctggccttggg

SEQ ID NO: 7187 - DNA, 20 bp, Artificial Sequence
  Description of Artificial Sequence: Synthetic oligonucleotide
attatgggctggccttggga

SEQ ID NO: 7188 - DNA, 20 bp, Artificial Sequence
  Description of Artificial Sequence: Synthetic oligonucleotide
ttatgggctggccttgggaa

SEQ ID NO: 7189 - DNA, 20 bp, Artificial Sequence
  Description of Artificial Sequence: Synthetic oligonucleotide
tatgggctggccttgggaag

SEQ ID NO: 7190 - DNA, 20 bp, Artificial Sequence
  Description of Artificial Sequence: Synthetic oligonucleotide
atgggctggccttgggaaga

SEQ ID NO: 7191 - DNA, 20 bp, Artificial Sequence
  Description of Artificial Sequence: Synthetic oligonucleotide
tgggctggccttgggaagat

SEQ ID NO: 7192 - DNA, 20 bp, Artificial Sequence
  Description of Artificial Sequence: Synthetic oligonucleotide
gggctggccttgggaagatc

SEQ ID NO: 7193 - DNA, 20 bp, Artificial Sequence
  Description of Artificial Sequence: Synthetic oligonucleotide
ggctggccttgggaagatct

SEQ ID NO: 7194 - DNA, 20 bp, Artificial Sequence
  Description of Artificial Sequence: Synthetic oligonucleotide
gctggccttgggaagatctt

SEQ ID NO: 7195 - DNA, 20 bp, Artificial Sequence
  Description of Artificial Sequence: Synthetic oligonucleotide
ctggccttgggaagatcttt

SEQ ID NO: 7196 - DNA, 20 bp, Artificial Sequence
  Description of Artificial Sequence: Synthetic oligonucleotide
tggccttgggaagatctttg

SEQ ID NO: 7197 - DNA, 20 bp, Artificial Sequence
  Description of Artificial Sequence: Synthetic oligonucleotide
ggccttgggaagatctttgt

SEQ ID NO: 7198 - DNA, 20 bp, Artificial Sequence
  Description of Artificial Sequence: Synthetic oligonucleotide
gccttgggaagatctttgtc

SEQ ID NO: 7199 - DNA, 20 bp, Artificial Sequence
  Description of Artificial Sequence: Synthetic oligonucleotide
ccttgggaagatctttgtcc

SEQ ID NO: 7200 - DNA, 20 bp, Artificial Sequence
  Description of Artificial Sequence: Synthetic oligonucleotide
cttgggaagatctttgtccc

SEQ ID NO: 7201 - DNA, 20 bp, Artificial Sequence
  Description of Artificial Sequence: Synthetic oligonucleotide
ttgggaagatctttgtccca

SEQ ID NO: 7202 - DNA, 20 bp, Artificial Sequence
  Description of Artificial Sequence: Synthetic oligonucleotide
tgggaagatctttgtcccaa

SEQ ID NO: 7203 - DNA, 20 bp, Artificial Sequence
  Description of Artificial Sequence: Synthetic oligonucleotide
gggaagatctttgtcccaag

SEQ ID NO: 7204 - DNA, 20 bp, Artificial Sequence
  Description of Artificial Sequence: Synthetic oligonucleotide
ggaagatctttgtcccaaga

SEQ ID NO: 7205 - DNA, 20 bp, Artificial Sequence
  Description of Artificial Sequence: Synthetic oligonucleotide
gaagatctttgtcccaagaa

SEQ ID NO: 7206 - DNA, 20 bp, Artificial Sequence
  Description of Artificial Sequence: Synthetic oligonucleotide
aagatctttgtcccaagaac

SEQ ID NO: 7207 - DNA, 20 bp, Artificial Sequence
  Description of Artificial Sequence: Synthetic oligonucleotide
agatctttgtcccaagaacc

SEQ ID NO: 7208 - DNA, 20 bp, Artificial Sequence
  Description of Artificial Sequence: Synthetic oligonucleotide
gatctttgtcccaagaaccc

SEQ ID NO: 7209 - DNA, 20 bp, Artificial Sequence
  Description of Artificial Sequence: Synthetic oligonucleotide
atctttgtcccaagaaccca

SEQ ID NO: 7210 - DNA, 20 bp, Artificial Sequence
  Description of Artificial Sequence: Synthetic oligonucleotide
tctttgtcccaagaacccag

SEQ ID NO: 7211 - DNA, 20 bp, Artificial Sequence
  Description of Artificial Sequence: Synthetic oligonucleotide
ctttgtcccaagaacccagc

SEQ ID NO: 7212 - DNA, 20 bp, Artificial Sequence
  Description of Artificial Sequence: Synthetic oligonucleotide
tttgtcccaagaacccagca

SEQ ID NO: 7213 - DNA, 20 bp, Artificial Sequence
  Description of Artificial Sequence: Synthetic oligonucleotide
ttgtcccaagaacccagcag

SEQ ID NO: 7214 - DNA, 20 bp, Artificial Sequence
  Description of Artificial Sequence: Synthetic oligonucleotide
tgtcccaagaacccagcagg

SEQ ID NO: 7215 - DNA, 20 bp, Artificial Sequence
  Description of Artificial Sequence: Synthetic oligonucleotide
gtcccaagaacccagcaggg

SEQ ID NO: 7216 - DNA, 20 bp, Artificial Sequence
  Description of Artificial Sequence: Synthetic oligonucleotide
tcccaagaacccagcaggga

SEQ ID NO: 7217 - DNA, 20 bp, Artificial Sequence
  Description of Artificial Sequence: Synthetic oligonucleotide
cccaagaacccagcagggac

SEQ ID NO: 7218 - DNA, 20 bp, Artificial Sequence
  Description of Artificial Sequence: Synthetic oligonucleotide
ccaagaacccagcagggact

SEQ ID NO: 7219 - DNA, 20 bp, Artificial Sequence
  Description of Artificial Sequence: Synthetic oligonucleotide
caagaacccagcagggactg

SEQ ID NO: 7220 - DNA, 20 bp, Artificial Sequence
  Description of Artificial Sequence: Synthetic oligonucleotide
aagaacccagcagggactga

SEQ ID NO: 7221 - DNA, 20 bp, Artificial Sequence
  Description of Artificial Sequence: Synthetic oligonucleotide
agaacccagcagggactgag

SEQ ID NO: 7222 - DNA, 20 bp, Artificial Sequence
  Description of Artificial Sequence: Synthetic oligonucleotide
gaacccagcagggactgagt

SEQ ID NO: 7223 - DNA, 20 bp, Artificial Sequence
  Description of Artificial Sequence: Synthetic oligonucleotide
aacccagcagggactgagtg

SEQ ID NO: 7224 - DNA, 20 bp, Artificial Sequence
  Description of Artificial Sequence: Synthetic oligonucleotide
acccagcagggactgagtgt

SEQ ID NO: 7225 - DNA, 20 bp, Artificial Sequence
  Description of Artificial Sequence: Synthetic oligonucleotide
cccagcagggactgagtgtg

SEQ ID NO: 7226 - DNA, 20 bp, Artificial Sequence
  Description of Artificial Sequence: Synthetic oligonucleotide
ccagcagggactgagtgtgg

SEQ ID NO: 7227 - DNA, 20 bp, Artificial Sequence
  Description of Artificial Sequence: Synthetic oligonucleotide
cagcagggactgagtgtggg

SEQ ID NO: 7228 - DNA, 20 bp, Artificial Sequence
  Description of Artificial Sequence: Synthetic oligonucleotide
agcagggactgagtgtggga

SEQ ID NO: 7229 - DNA, 20 bp, Artificial Sequence
  Description of Artificial Sequence: Synthetic oligonucleotide
gcagggactgagtgtgggag

SEQ ID NO: 7230 - DNA, 20 bp, Artificial Sequence
  Description of Artificial Sequence: Synthetic oligonucleotide
cagggactgagtgtgggagg

SEQ ID NO: 7231 - DNA, 20 bp, Artificial Sequence
  Description of Artificial Sequence: Synthetic oligonucleotide
agggactgagtgtgggaggg

SEQ ID NO: 7232 - DNA, 20 bp, Artificial Sequence
  Description of Artificial Sequence: Synthetic oligonucleotide
gggactgagtgtgggaggga

SEQ ID NO: 7233 - DNA, 20 bp, Artificial Sequence
  Description of Artificial Sequence: Synthetic oligonucleotide
ggactgagtgtgggagggag

SEQ ID NO: 7234 - DNA, 20 bp, Artificial Sequence
  Description of Artificial Sequence: Synthetic oligonucleotide
gactgagtgtgggagggagt

SEQ ID NO: 7235 - DNA, 20 bp, Artificial Sequence
  Description of Artificial Sequence: Synthetic oligonucleotide
actgagtgtgggagggagta

SEQ ID NO: 7236 - DNA, 20 bp, Artificial Sequence
  Description of Artificial Sequence: Synthetic oligonucleotide
ctgagtgtgggagggagtag

SEQ ID NO: 7237 - DNA, 20 bp, Artificial Sequence
  Description of Artificial Sequence: Synthetic oligonucleotide
tgagtgtgggagggagtagg

SEQ ID NO: 7238 - DNA, 20 bp, Artificial Sequence
  Description of Artificial Sequence: Synthetic oligonucleotide
gagtgtgggagggagtaggc

SEQ ID NO: 7239 - DNA, 20 bp, Artificial Sequence
  Description of Artificial Sequence: Synthetic oligonucleotide
agtgtgggagggagtaggca

SEQ ID NO: 7240 - DNA, 20 bp, Artificial Sequence
  Description of Artificial Sequence: Synthetic oligonucleotide
gtgtgggagggagtaggcag

SEQ ID NO: 7241 - DNA, 20 bp, Artificial Sequence
  Description of Artificial Sequence: Synthetic oligonucleotide
tgtgggagggagtaggcagt

SEQ ID NO: 7242 - DNA, 20 bp, Artificial Sequence
  Description of Artificial Sequence: Synthetic oligonucleotide
gtgggagggagtaggcagtg

SEQ ID NO: 7243 - DNA, 20 bp, Artificial Sequence
  Description of Artificial Sequence: Synthetic oligonucleotide
tgggagggagtaggcagtgg

SEQ ID NO: 7244 - DNA, 20 bp, Artificial Sequence
  Description of Artificial Sequence: Synthetic oligonucleotide
gggagggagtaggcagtgga

SEQ ID NO: 7245 - DNA, 20 bp, Artificial Sequence
  Description of Artificial Sequence: Synthetic oligonucleotide
ggagggagtaggcagtggaa

SEQ ID NO: 7246 - DNA, 20 bp, Artificial Sequence
  Description of Artificial Sequence: Synthetic oligonucleotide
gagggagtaggcagtggaaa

SEQ ID NO: 7247 - DNA, 20 bp, Artificial Sequence
  Description of Artificial Sequence: Synthetic oligonucleotide
agggagtaggcagtggaaat

SEQ ID NO: 7248 - DNA, 20 bp, Artificial Sequence
  Description of Artificial Sequence: Synthetic oligonucleotide
gggagtaggcagtggaaatc

SEQ ID NO: 7249 - DNA, 20 bp, Artificial Sequence
  Description of Artificial Sequence: Synthetic oligonucleotide
ggagtaggcagtggaaatct

SEQ ID NO: 7250 - DNA, 20 bp, Artificial Sequence
  Description of Artificial Sequence: Synthetic oligonucleotide
gagtaggcagtggaaatctg

SEQ ID NO: 7251 - DNA, 20 bp, Artificial Sequence
  Description of Artificial Sequence: Synthetic oligonucleotide
agtaggcagtggaaatctgc

SEQ ID NO: 7252 - DNA, 20 bp, Artificial Sequence
  Description of Artificial Sequence: Synthetic oligonucleotide
gtaggcagtggaaatctgca

SEQ ID NO: 7253 - DNA, 20 bp, Artificial Sequence
  Description of Artificial Sequence: Synthetic oligonucleotide
taggcagtggaaatctgcaa

SEQ ID NO: 7254 - DNA, 20 bp, Artificial Sequence
  Description of Artificial Sequence: Synthetic oligonucleotide
aggcagtggaaatctgcaaa

SEQ ID NO: 7255 - DNA, 20 bp, Artificial Sequence
  Description of Artificial Sequence: Synthetic oligonucleotide
ggcagtggaaatctgcaaag

SEQ ID NO: 7256 - DNA, 20 bp, Artificial Sequence
  Description of Artificial Sequence: Synthetic oligonucleotide
gcagtggaaatctgcaaagc

SEQ ID NO: 7257 - DNA, 20 bp, Artificial Sequence
  Description of Artificial Sequence: Synthetic oligonucleotide
cagtggaaatctgcaaagcc

SEQ ID NO: 7258 - DNA, 20 bp, Artificial Sequence
  Description of Artificial Sequence: Synthetic oligonucleotide
agtggaaatctgcaaagcct

SEQ ID NO: 7259 - DNA, 20 bp, Artificial Sequence
  Description of Artificial Sequence: Synthetic oligonucleotide
gtggaaatctgcaaagcctc

SEQ ID NO: 7260 - DNA, 20 bp, Artificial Sequence
  Description of Artificial Sequence: Synthetic oligonucleotide
tggaaatctgcaaagcctct

SEQ ID NO: 7261 - DNA, 20 bp, Artificial Sequence
  Description of Artificial Sequence: Synthetic oligonucleotide
ggaaatctgcaaagcctctc

SEQ ID NO: 7262 - DNA, 20 bp, Artificial Sequence
  Description of Artificial Sequence: Synthetic oligonucleotide
gaaatctgcaaagcctctct

SEQ ID NO: 7263 - DNA, 20 bp, Artificial Sequence
  Description of Artificial Sequence: Synthetic oligonucleotide
aaatctgcaaagcctctctg

SEQ ID NO: 7264 - DNA, 20 bp, Artificial Sequence
  Description of Artificial Sequence: Synthetic oligonucleotide
aatctgcaaagcctctctgg

SEQ ID NO: 7265 - DNA, 20 bp, Artificial Sequence
  Description of Artificial Sequence: Synthetic oligonucleotide
atctgcaaagcctctctggg

SEQ ID NO: 7266 - DNA, 20 bp, Artificial Sequence
  Description of Artificial Sequence: Synthetic oligonucleotide
tctgcaaagcctctctgggc

SEQ ID NO: 7267 - DNA, 20 bp, Artificial Sequence
  Description of Artificial Sequence: Synthetic oligonucleotide
ctgcaaagcctctctgggcc

SEQ ID NO: 7268 - DNA, 20 bp, Artificial Sequence
  Description of Artificial Sequence: Synthetic oligonucleotide
tgcaaagcctctctgggcca

SEQ ID NO: 7269 - DNA, 20 bp, Artificial Sequence
  Description of Artificial Sequence: Synthetic oligonucleotide
gcaaagcctctctgggccag

SEQ ID NO: 7270 - DNA, 20 bp, Artificial Sequence
  Description of Artificial Sequence: Synthetic oligonucleotide
caaagcctctctgggccagc

SEQ ID NO: 7271 - DNA, 20 bp, Artificial Sequence
  Description of Artificial Sequence: Synthetic oligonucleotide
aaagcctctctgggccagct

SEQ ID NO: 7272 - DNA, 20 bp, Artificial Sequence
  Description of Artificial Sequence: Synthetic oligonucleotide
aagcctctctgggccagctg

SEQ ID NO: 7273 - DNA, 20 bp, Artificial Sequence
  Description of Artificial Sequence: Synthetic oligonucleotide
agcctctctgggccagctga

SEQ ID NO: 7274 - DNA, 20 bp, Artificial Sequence
  Description of Artificial Sequence: Synthetic oligonucleotide
gcctctctgggccagctgaa

SEQ ID NO: 7275 - DNA, 20 bp, Artificial Sequence
  Description of Artificial Sequence: Synthetic oligonucleotide
cctctctgggccagctgaac

SEQ ID NO: 7276 - DNA, 20 bp, Artificial Sequence
  Description of Artificial Sequence: Synthetic oligonucleotide
ctctctgggccagctgaact

SEQ ID NO: 7277 - DNA, 20 bp, Artificial Sequence
  Description of Artificial Sequence: Synthetic oligonucleotide
tctctgggccagctgaactg

SEQ ID NO: 7278 - DNA, 20 bp, Artificial Sequence
  Description of Artificial Sequence: Synthetic oligonucleotide
ctctgggccagctgaactgg

SEQ ID NO: 7279 - DNA, 20 bp, Artificial Sequence
  Description of Artificial Sequence: Synthetic oligonucleotide
tctgggccagctgaactggg

SEQ ID NO: 7280 - DNA, 20 bp, Artificial Sequence
  Description of Artificial Sequence: Synthetic oligonucleotide
ctgggccagctgaactgggt

SEQ ID NO: 7281 - DNA, 20 bp, Artificial Sequence
  Description of Artificial Sequence: Synthetic oligonucleotide
tgggccagctgaactgggta

SEQ ID NO: 7282 - DNA, 20 bp, Artificial Sequence
  Description of Artificial Sequence: Synthetic oligonucleotide
gggccagctgaactgggtaa

SEQ ID NO: 7283 - DNA, 20 bp, Artificial Sequence
  Description of Artificial Sequence: Synthetic oligonucleotide
ggccagctgaactgggtaaa

SEQ ID NO: 7284 - DNA, 20 bp, Artificial Sequence
  Description of Artificial Sequence: Synthetic oligonucleotide
gccagctgaactgggtaaaa

SEQ ID NO: 7285 - DNA, 20 bp, Artificial Sequence
  Description of Artificial Sequence: Synthetic oligonucleotide
ccagctgaactgggtaaaac

SEQ ID NO: 7286 - DNA, 20 bp, Artificial Sequence
  Description of Artificial Sequence: Synthetic oligonucleotide
cagctgaactgggtaaaacc

SEQ ID NO: 7287 - DNA, 20 bp, Artificial Sequence
  Description of Artificial Sequence: Synthetic oligonucleotide
agctgaactgggtaaaaccc

SEQ ID NO: 7288 - DNA, 20 bp, Artificial Sequence
  Description of Artificial Sequence: Synthetic oligonucleotide
gctgaactgggtaaaacccc

SEQ ID NO: 7289 - DNA, 20 bp, Artificial Sequence
  Description of Artificial Sequence: Synthetic oligonucleotide
ctgaactgggtaaaaccccg

SEQ ID NO: 7290 - DNA, 20 bp, Artificial Sequence
  Description of Artificial Sequence: Synthetic oligonucleotide
tgaactgggtaaaaccccgt

SEQ ID NO: 7291 - DNA, 20 bp, Artificial Sequence
  Description of Artificial Sequence: Synthetic oligonucleotide
gaactgggtaaaaccccgtg

SEQ ID NO: 7292 - DNA, 20 bp, Artificial Sequence
  Description of Artificial Sequence: Synthetic oligonucleotide
aactgggtaaaaccccgtgt

SEQ ID NO: 7293 - DNA, 20 bp, Artificial Sequence
  Description of Artificial Sequence: Synthetic oligonucleotide
actgggtaaaaccccgtgtt

SEQ ID NO: 7294 - DNA, 20 bp, Artificial Sequence
  Description of Artificial Sequence: Synthetic oligonucleotide
ctgggtaaaaccccgtgttg

SEQ ID NO: 7295 - DNA, 20 bp, Artificial Sequence
  Description of Artificial Sequence: Synthetic oligonucleotide
tgggtaaaaccccgtgttgt

SEQ ID NO: 7296 - DNA, 20 bp, Artificial Sequence
  Description of Artificial Sequence: Synthetic oligonucleotide
gggtaaaaccccgtgttgta

SEQ ID NO: 7297 - DNA, 20 bp, Artificial Sequence
  Description of Artificial Sequence: Synthetic oligonucleotide
ggtaaaaccccgtgttgtaa

SEQ ID NO: 7298 - DNA, 20 bp, Artificial Sequence
  Description of Artificial Sequence: Synthetic oligonucleotide
gtaaaaccccgtgttgtaac

SEQ ID NO: 7299 - DNA, 20 bp, Artificial Sequence
  Description of Artificial Sequence: Synthetic oligonucleotide
taaaaccccgtgttgtaacc

SEQ ID NO: 7300 - DNA, 20 bp, Artificial Sequence
  Description of Artificial Sequence: Synthetic oligonucleotide
aaaaccccgtgttgtaacct

SEQ ID NO: 7301 - DNA, 20 bp, Artificial Sequence
  Description of Artificial Sequence: Synthetic oligonucleotide
aaaccccgtgttgtaacctc

SEQ ID NO: 7302 - DNA, 20 bp, Artificial Sequence
  Description of Artificial Sequence: Synthetic oligonucleotide
aaccccgtgttgtaacctct

SEQ ID NO: 7303 - DNA, 20 bp, Artificial Sequence
  Description of Artificial Sequence: Synthetic oligonucleotide
accccgtgttgtaacctctt

SEQ ID NO: 7304 - DNA, 20 bp, Artificial Sequence
  Description of Artificial Sequence: Synthetic oligonucleotide
ccccgtgttgtaacctcttg

SEQ ID NO: 7305 - DNA, 20 bp, Artificial Sequence
  Description of Artificial Sequence: Synthetic oligonucleotide
cccgtgttgtaacctcttgt

SEQ ID NO: 7306 - DNA, 20 bp, Artificial Sequence
  Description of Artificial Sequence: Synthetic oligonucleotide
ccgtgttgtaacctcttgta

SEQ ID NO: 7307 - DNA, 20 bp, Artificial Sequence
  Description of Artificial Sequence: Synthetic oligonucleotide
cgtgttgtaacctcttgtaa

SEQ ID NO: 7308 - DNA, 20 bp, Artificial Sequence
  Description of Artificial Sequence: Synthetic oligonucleotide
gtgttgtaacctcttgtaat

SEQ ID NO: 7309 - DNA, 20 bp, Artificial Sequence
  Description of Artificial Sequence: Synthetic oligonucleotide
tgttgtaacctcttgtaatg

SEQ ID NO: 7310 - DNA, 20 bp, Artificial Sequence
  Description of Artificial Sequence: Synthetic oligonucleotide
gttgtaacctcttgtaatgg

SEQ ID NO: 7311 - DNA, 20 bp, Artificial Sequence
  Description of Artificial Sequence: Synthetic oligonucleotide
ttgtaacctcttgtaatgga

SEQ ID NO: 7312 - DNA, 20 bp, Artificial Sequence
  Description of Artificial Sequence: Synthetic oligonucleotide
tgtaacctcttgtaatggaa

SEQ ID NO: 7313 - DNA, 20 bp, Artificial Sequence
  Description of Artificial Sequence: Synthetic oligonucleotide
gtaacctcttgtaatggaaa

SEQ ID NO: 7314 - DNA, 20 bp, Artificial Sequence
  Description of Artificial Sequence: Synthetic oligonucleotide
taacctcttgtaatggaaag

SEQ ID NO: 7315 - DNA, 20 bp, Artificial Sequence
  Description of Artificial Sequence: Synthetic oligonucleotide
aacctcttgtaatggaaagg

SEQ ID NO: 7316 - DNA, 20 bp, Artificial Sequence
  Description of Artificial Sequence: Synthetic oligonucleotide
acctcttgtaatggaaagga

SEQ ID NO: 7317 - DNA, 20 bp, Artificial Sequence
  Description of Artificial Sequence: Synthetic oligonucleotide
cctcttgtaatggaaaggac

SEQ ID NO: 7318 - DNA, 20 bp, Artificial Sequence
  Description of Artificial Sequence: Synthetic oligonucleotide
ctcttgtaatggaaaggact

SEQ ID NO: 7319 - DNA, 20 bp, Artificial Sequence
  Description of Artificial Sequence: Synthetic oligonucleotide
tcttgtaatggaaaggactt

SEQ ID NO: 7320 - DNA, 20 bp, Artificial Sequence
  Description of Artificial Sequence: Synthetic oligonucleotide
cttgtaatggaaaggacttc

SEQ ID NO: 7321 - DNA, 20 bp, Artificial Sequence
  Description of Artificial Sequence: Synthetic oligonucleotide
ttgtaatggaaaggacttct

SEQ ID NO: 7322 - DNA, 20 bp, Artificial Sequence
  Description of Artificial Sequence: Synthetic oligonucleotide
tgtaatggaaaggacttctc

SEQ ID NO: 7323 - DNA, 20 bp, Artificial Sequence
  Description of Artificial Sequence: Synthetic oligonucleotide
gtaatggaaaggacttctca

SEQ ID NO: 7324 - DNA, 20 bp, Artificial Sequence
  Description of Artificial Sequence: Synthetic oligonucleotide
taatggaaaggacttctcag

SEQ ID NO: 7325 - DNA, 20 bp, Artificial Sequence
  Description of Artificial Sequence: Synthetic oligonucleotide
aatggaaaggacttctcagt

SEQ ID NO: 7326 - DNA, 20 bp, Artificial Sequence
  Description of Artificial Sequence: Synthetic oligonucleotide
atggaaaggacttctcagtg

SEQ ID NO: 7327 - DNA, 20 bp, Artificial Sequence
  Description of Artificial Sequence: Synthetic oligonucleotide
tggaaaggacttctcagtgg

SEQ ID NO: 7328 - DNA, 20 bp, Artificial Sequence
  Description of Artificial Sequence: Synthetic oligonucleotide
ggaaaggacttctcagtgga

SEQ ID NO: 7329 - DNA, 20 bp, Artificial Sequence
  Description of Artificial Sequence: Synthetic oligonucleotide
gaaaggacttctcagtggaa

SEQ ID NO: 7330 - DNA, 20 bp, Artificial Sequence
  Description of Artificial Sequence: Synthetic oligonucleotide
aaaggacttctcagtggaaa

SEQ ID NO: 7331 - DNA, 20 bp, Artificial Sequence
  Description of Artificial Sequence: Synthetic oligonucleotide
aaggacttctcagtggaaaa

SEQ ID NO: 7332 - DNA, 20 bp, Artificial Sequence
  Description of Artificial Sequence: Synthetic oligonucleotide
aggacttctcagtggaaaaa

SEQ ID NO: 7333 - DNA, 20 bp, Artificial Sequence
  Description of Artificial Sequence: Synthetic oligonucleotide
ggacttctcagtggaaaaaa

SEQ ID NO: 7334 - DNA, 20 bp, Artificial Sequence
  Description of Artificial Sequence: Synthetic oligonucleotide
gacttctcagtggaaaaaaa

SEQ ID NO: 7335 - DNA, 20 bp, Artificial Sequence
  Description of Artificial Sequence: Synthetic oligonucleotide
acttctcagtggaaaaaaaa

SEQ ID NO: 7336 - DNA, 20 bp, Artificial Sequence
  Description of Artificial Sequence: Synthetic oligonucleotide
cttctcagtggaaaaaaaag

SEQ ID NO: 7337 - DNA, 20 bp, Artificial Sequence
  Description of Artificial Sequence: Synthetic oligonucleotide
ttctcagtggaaaaaaaagc

SEQ ID NO: 7338 - DNA, 20 bp, Artificial Sequence
  Description of Artificial Sequence: Synthetic oligonucleotide
tctcagtggaaaaaaaagct

SEQ ID NO: 7339 - DNA, 20 bp, Artificial Sequence
  Description of Artificial Sequence: Synthetic oligonucleotide
ctcagtggaaaaaaaagctt

SEQ ID NO: 7340 - DNA, 20 bp, Artificial Sequence
  Description of Artificial Sequence: Synthetic oligonucleotide
tcagtggaaaaaaaagcttt

SEQ ID NO: 7341 - DNA, 20 bp, Artificial Sequence
  Description of Artificial Sequence: Synthetic oligonucleotide
cagtggaaaaaaaagctttc

SEQ ID NO: 7342 - DNA, 20 bp, Artificial Sequence
  Description of Artificial Sequence: Synthetic oligonucleotide
agtggaaaaaaaagctttct

SEQ ID NO: 7343 - DNA, 20 bp, Artificial Sequence
  Description of Artificial Sequence: Synthetic oligonucleotide
gtggaaaaaaaagctttctt

SEQ ID NO: 7344 - DNA, 20 bp, Artificial Sequence
  Description of Artificial Sequence: Synthetic oligonucleotide
tggaaaaaaaagctttcttt

SEQ ID NO: 7345 - DNA, 20 bp, Artificial Sequence
  Description of Artificial Sequence: Synthetic oligonucleotide
ggaaaaaaaagctttctttt

SEQ ID NO: 7346 - DNA, 20 bp, Artificial Sequence
  Description of Artificial Sequence: Synthetic oligonucleotide
gaaaaaaaagctttcttttt

SEQ ID NO: 7347 - DNA, 20 bp, Artificial Sequence
  Description of Artificial Sequence: Synthetic oligonucleotide
aaaaaaaagctttctttttt

SEQ ID NO: 7348 - DNA, 20 bp, Artificial Sequence
  Description of Artificial Sequence: Synthetic oligonucleotide
aaaaaaagctttcttttttt

SEQ ID NO: 7349 - DNA, 20 bp, Artificial Sequence
  Description of Artificial Sequence: Synthetic oligonucleotide
aaaaaagctttctttttttt

SEQ ID NO: 7350 - DNA, 20 bp, Artificial Sequence
  Description of Artificial Sequence: Synthetic oligonucleotide
aaaaagctttcttttttttt

SEQ ID NO: 7351 - DNA, 20 bp, Artificial Sequence
  Description of Artificial Sequence: Synthetic oligonucleotide
aaaagctttctttttttttt

SEQ ID NO: 7352 - DNA, 20 bp, Artificial Sequence
  Description of Artificial Sequence: Synthetic oligonucleotide
aaagctttcttttttttttt

SEQ ID NO: 7353 - DNA, 20 bp, Artificial Sequence
  Description of Artificial Sequence: Synthetic oligonucleotide
aagctttctttttttttttt

SEQ ID NO: 7354 - DNA, 20 bp, Artificial Sequence
  Description of Artificial Sequence: Synthetic oligonucleotide
agctttcttttttttttttt

SEQ ID NO: 7355 - DNA, 20 bp, Artificial Sequence
  Description of Artificial Sequence: Synthetic oligonucleotide
gctttctttttttttttttt

SEQ ID NO: 7356 - DNA, 20 bp, Artificial Sequence
  Description of Artificial Sequence: Synthetic oligonucleotide
ctttcttttttttttttttt

SEQ ID NO: 7357 - DNA, 20 bp, Artificial Sequence
  Description of Artificial Sequence: Synthetic oligonucleotide
tttctttttttttttttttt

SEQ ID NO: 7358 - DNA, 20 bp, Artificial Sequence
  Description of Artificial Sequence: Synthetic oligonucleotide
ttcttttttttttttttttt

SEQ ID NO: 7359 - DNA, 20 bp, Artificial Sequence
  Description of Artificial Sequence: Synthetic oligonucleotide
tctttttttttttttttttt

SEQ ID NO: 7360 - DNA, 20 bp, Artificial Sequence
  Description of Artificial Sequence: Synthetic oligonucleotide
cttttttttttttttttttt

SEQ ID NO: 7361 - DNA, 20 bp, Artificial Sequence
  Description of Artificial Sequence: Synthetic oligonucleotide
tttttttttttttttttttt

SEQ ID NO: 7362 - DNA, 20 bp, Artificial Sequence
  Description of Artificial Sequence: Synthetic oligonucleotide
tttttttttttttttttttt

SEQ ID NO: 7363 - DNA, 20 bp, Artificial Sequence
  Description of Artificial Sequence: Synthetic oligonucleotide
ttttttttttttttttttta

SEQ ID NO: 7364 - DNA, 20 bp, Artificial Sequence
  Description of Artificial Sequence: Synthetic oligonucleotide
ttttttttttttttttttag

SEQ ID NO: 7365 - DNA, 20 bp, Artificial Sequence
  Description of Artificial Sequence: Synthetic oligonucleotide
tttttttttttttttttaga

SEQ ID NO: 7366 - DNA, 20 bp, Artificial Sequence
  Description of Artificial Sequence: Synthetic oligonucleotide
ttttttttttttttttagag

SEQ ID NO: 7367 - DNA, 20 bp, Artificial Sequence
  Description of Artificial Sequence: Synthetic oligonucleotide
tttttttttttttttagaga

SEQ ID NO: 7368 - DNA, 20 bp, Artificial Sequence
  Description of Artificial Sequence: Synthetic oligonucleotide
ttttttttttttttagagat

SEQ ID NO: 7369 - DNA, 20 bp, Artificial Sequence
  Description of Artificial Sequence: Synthetic oligonucleotide
tttttttttttttagagatg

SEQ ID NO: 7370 - DNA, 20 bp, Artificial Sequence
  Description of Artificial Sequence: Synthetic oligonucleotide
ttttttttttttagagatgg

SEQ ID NO: 7371 - DNA, 20 bp, Artificial Sequence
  Description of Artificial Sequence: Synthetic oligonucleotide
tttttttttttagagatgga

SEQ ID NO: 7372 - DNA, 20 bp, Artificial Sequence
  Description of Artificial Sequence: Synthetic oligonucleotide
ttttttttttagagatggag

SEQ ID NO: 7373 - DNA, 20 bp, Artificial Sequence
  Description of Artificial Sequence: Synthetic oligonucleotide
tttttttttagagatggagt

SEQ ID NO: 7374 - DNA, 20 bp, Artificial Sequence
  Description of Artificial Sequence: Synthetic oligonucleotide
ttttttttagagatggagtc

SEQ ID NO: 7375 - DNA, 20 bp, Artificial Sequence
  Description of Artificial Sequence: Synthetic oligonucleotide
tttttttagagatggagtct

SEQ ID NO: 7376 - DNA, 20 bp, Artificial Sequence
  Description of Artificial Sequence: Synthetic oligonucleotide
ttttttagagatggagtctc

SEQ ID NO: 7377 - DNA, 20 bp, Artificial Sequence
  Description of Artificial Sequence: Synthetic oligonucleotide
tttttagagatggagtctca

SEQ ID NO: 7378 - DNA, 20 bp, Artificial Sequence
  Description of Artificial Sequence: Synthetic oligonucleotide
ttttagagatggagtctcac

SEQ ID NO: 7379 - DNA, 20 bp, Artificial Sequence
  Description of Artificial Sequence: Synthetic oligonucleotide
tttagagatggagtctcact

SEQ ID NO: 7380 - DNA, 20 bp, Artificial Sequence
  Description of Artificial Sequence: Synthetic oligonucleotide
ttagagatggagtctcactc

SEQ ID NO: 7381 - DNA, 20 bp, Artificial Sequence
  Description of Artificial Sequence: Synthetic oligonucleotide
tagagatggagtctcactct

SEQ ID NO: 7382 - DNA, 20 bp, Artificial Sequence
  Description of Artificial Sequence: Synthetic oligonucleotide
agagatggagtctcactctg

SEQ ID NO: 7383 - DNA, 20 bp, Artificial Sequence
  Description of Artificial Sequence: Synthetic oligonucleotide
gagatggagtctcactctgt

SEQ ID NO: 7384 - DNA, 20 bp, Artificial Sequence
  Description of Artificial Sequence: Synthetic oligonucleotide
agatggagtctcactctgtt

SEQ ID NO: 7385 - DNA, 20 bp, Artificial Sequence
  Description of Artificial Sequence: Synthetic oligonucleotide
gatggagtctcactctgttg

SEQ ID NO: 7386 - DNA, 20 bp, Artificial Sequence
  Description of Artificial Sequence: Synthetic oligonucleotide
atggagtctcactctgttgc

SEQ ID NO: 7387 - DNA, 20 bp, Artificial Sequence
  Description of Artificial Sequence: Synthetic oligonucleotide
tggagtctcactctgttgcc

SEQ ID NO: 7388 - DNA, 20 bp, Artificial Sequence
  Description of Artificial Sequence: Synthetic oligonucleotide
ggagtctcactctgttgccc

SEQ ID NO: 7389 - DNA, 20 bp, Artificial Sequence
  Description of Artificial Sequence: Synthetic oligonucleotide
gagtctcactctgttgccca

SEQ ID NO: 7390 - DNA, 20 bp, Artificial Sequence
  Description of Artificial Sequence: Synthetic oligonucleotide
agtctcactctgttgcccag

SEQ ID NO: 7391 - DNA, 20 bp, Artificial Sequence
  Description of Artificial Sequence: Synthetic oligonucleotide
gtctcactctgttgcccagg

SEQ ID NO: 7392 - DNA, 20 bp, Artificial Sequence
  Description of Artificial Sequence: Synthetic oligonucleotide
tctcactctgttgcccaggc

SEQ ID NO: 7393 - DNA, 20 bp, Artificial Sequence
  Description of Artificial Sequence: Synthetic oligonucleotide
ctcactctgttgcccaggct

SEQ ID NO: 7394 - DNA, 20 bp, Artificial Sequence
  Description of Artificial Sequence: Synthetic oligonucleotide
tcactctgttgcccaggctg

SEQ ID NO: 7395 - DNA, 20 bp, Artificial Sequence
  Description of Artificial Sequence: Synthetic oligonucleotide
cactctgttgcccaggctgg

SEQ ID NO: 7396 - DNA, 20 bp, Artificial Sequence
  Description of Artificial Sequence: Synthetic oligonucleotide
actctgttgcccaggctgga

SEQ ID NO: 7397 - DNA, 20 bp, Artificial Sequence
  Description of Artificial Sequence: Synthetic oligonucleotide
ctctgttgcccaggctggat

SEQ ID NO: 7398 - DNA, 20 bp, Artificial Sequence
  Description of Artificial Sequence: Synthetic oligonucleotide
tctgttgcccaggctggatc

SEQ ID NO: 7399 - DNA, 20 bp, Artificial Sequence
  Description of Artificial Sequence: Synthetic oligonucleotide
ctgttgcccaggctggatcg

SEQ ID NO: 7400 - DNA, 20 bp, Artificial Sequence
  Description of Artificial Sequence: Synthetic oligonucleotide
tgttgcccaggctggatcgc

SEQ ID NO: 7401 - DNA, 20 bp, Artificial Sequence
  Description of Artificial Sequence: Synthetic oligonucleotide
gttgcccaggctggatcgca

SEQ ID NO: 7402 - DNA, 20 bp, Artificial Sequence
  Description of Artificial Sequence: Synthetic oligonucleotide
ttgcccaggctggatcgcag

SEQ ID NO: 7403 - DNA, 20 bp, Artificial Sequence
  Description of Artificial Sequence: Synthetic oligonucleotide
tgcccaggctggatcgcagt

SEQ ID NO: 7404 - DNA, 20 bp, Artificial Sequence
  Description of Artificial Sequence: Synthetic oligonucleotide
gcccaggctggatcgcagtg

SEQ ID NO: 7405 - DNA, 20 bp, Artificial Sequence
  Description of Artificial Sequence: Synthetic oligonucleotide
cccaggctggatcgcagtgc

SEQ ID NO: 7406 - DNA, 20 bp, Artificial Sequence
  Description of Artificial Sequence: Synthetic oligonucleotide
ccaggctggatcgcagtgcc

SEQ ID NO: 7407 - DNA, 20 bp, Artificial Sequence
  Description of Artificial Sequence: Synthetic oligonucleotide
caggctggatcgcagtgccg

SEQ ID NO: 7408 - DNA, 20 bp, Artificial Sequence
  Description of Artificial Sequence: Synthetic oligonucleotide
aggctggatcgcagtgccgc

SEQ ID NO: 7409 - DNA, 20 bp, Artificial Sequence
  Description of Artificial Sequence: Synthetic oligonucleotide
ggctggatcgcagtgccgca

SEQ ID NO: 7410 - DNA, 20 bp, Artificial Sequence
  Description of Artificial Sequence: Synthetic oligonucleotide
gctggatcgcagtgccgcaa

SEQ ID NO: 7411 - DNA, 20 bp, Artificial Sequence
  Description of Artificial Sequence: Synthetic oligonucleotide
ctggatcgcagtgccgcaat

SEQ ID NO: 7412 - DNA, 20 bp, Artificial Sequence
  Description of Artificial Sequence: Synthetic oligonucleotide
tggatcgcagtgccgcaatc

SEQ ID NO: 7413 - DNA, 20 bp, Artificial Sequence
  Description of Artificial Sequence: Synthetic oligonucleotide
ggatcgcagtgccgcaatct

SEQ ID NO: 7414 - DNA, 20 bp, Artificial Sequence
  Description of Artificial Sequence: Synthetic oligonucleotide
gatcgcagtgccgcaatctc

SEQ ID NO: 7415 - DNA, 20 bp, Artificial Sequence
  Description of Artificial Sequence: Synthetic oligonucleotide
atcgcagtgccgcaatctca

SEQ ID NO: 7416 - DNA, 20 bp, Artificial Sequence
  Description of Artificial Sequence: Synthetic oligonucleotide
tcgcagtgccgcaatctcag

SEQ ID NO: 7417 - DNA, 20 bp, Artificial Sequence
  Description of Artificial Sequence: Synthetic oligonucleotide
cgcagtgccgcaatctcagc

SEQ ID NO: 7418 - DNA, 20 bp, Artificial Sequence
  Description of Artificial Sequence: Synthetic oligonucleotide
gcagtgccgcaatctcagct

SEQ ID NO: 7419 - DNA, 20 bp, Artificial Sequence
  Description of Artificial Sequence: Synthetic oligonucleotide
cagtgccgcaatctcagctc

SEQ ID NO: 7420 - DNA, 20 bp, Artificial Sequence
  Description of Artificial Sequence: Synthetic oligonucleotide
agtgccgcaatctcagctca

SEQ ID NO: 7421 - DNA, 20 bp, Artificial Sequence
  Description of Artificial Sequence: Synthetic oligonucleotide
gtgccgcaatctcagctcac

SEQ ID NO: 7422 - DNA, 20 bp, Artificial Sequence
  Description of Artificial Sequence: Synthetic oligonucleotide
tgccgcaatctcagctcact

SEQ ID NO: 7423 - DNA, 20 bp, Artificial Sequence
  Description of Artificial Sequence: Synthetic oligonucleotide
gccgcaatctcagctcactg

SEQ ID NO: 7424 - DNA, 20 bp, Artificial Sequence
  Description of Artificial Sequence: Synthetic oligonucleotide
ccgcaatctcagctcactgc

SEQ ID NO: 7425 - DNA, 20 bp, Artificial Sequence
  Description of Artificial Sequence: Synthetic oligonucleotide
cgcaatctcagctcactgca

SEQ ID NO: 7426 - DNA, 20 bp, Artificial Sequence
  Description of Artificial Sequence: Synthetic oligonucleotide
gcaatctcagctcactgcaa

SEQ ID NO: 7427 - DNA, 20 bp, Artificial Sequence
  Description of Artificial Sequence: Synthetic oligonucleotide
caatctcagctcactgcaac

SEQ ID NO: 7428 - DNA, 20 bp, Artificial Sequence
  Description of Artificial Sequence: Synthetic oligonucleotide
aatctcagctcactgcaacc

SEQ ID NO: 7429 - DNA, 20 bp, Artificial Sequence
  Description of Artificial Sequence: Synthetic oligonucleotide
atctcagctcactgcaacct

SEQ ID NO: 7430 - DNA, 20 bp, Artificial Sequence
  Description of Artificial Sequence: Synthetic oligonucleotide
tctcagctcactgcaacctc

SEQ ID NO: 7431 - DNA, 20 bp, Artificial Sequence
  Description of Artificial Sequence: Synthetic oligonucleotide
ctcagctcactgcaacctct

SEQ ID NO: 7432 - DNA, 20 bp, Artificial Sequence
  Description of Artificial Sequence: Synthetic oligonucleotide
tcagctcactgcaacctctg

SEQ ID NO: 7433 - DNA, 20 bp, Artificial Sequence
  Description of Artificial Sequence: Synthetic oligonucleotide
cagctcactgcaacctctgc

SEQ ID NO: 7434 - DNA, 20 bp, Artificial Sequence
  Description of Artificial Sequence: Synthetic oligonucleotide
agctcactgcaacctctgcc

SEQ ID NO: 7435 - DNA, 20 bp, Artificial Sequence
  Description of Artificial Sequence: Synthetic oligonucleotide
gctcactgcaacctctgcct

SEQ ID NO: 7436 - DNA, 20 bp, Artificial Sequence
  Description of Artificial Sequence: Synthetic oligonucleotide
ctcactgcaacctctgcctt

SEQ ID NO: 7437 - DNA, 20 bp, Artificial Sequence
  Description of Artificial Sequence: Synthetic oligonucleotide
tcactgcaacctctgccttc

SEQ ID NO: 7438 - DNA, 20 bp, Artificial Sequence
  Description of Artificial Sequence: Synthetic oligonucleotide
cactgcaacctctgccttcg

SEQ ID NO: 7439 - DNA, 20 bp, Artificial Sequence
  Description of Artificial Sequence: Synthetic oligonucleotide
actgcaacctctgccttcgg

SEQ ID NO: 7440 - DNA, 20 bp, Artificial Sequence
  Description of Artificial Sequence: Synthetic oligonucleotide
ctgcaacctctgccttcggg

SEQ ID NO: 7441 - DNA, 20 bp, Artificial Sequence
  Description of Artificial Sequence: Synthetic oligonucleotide
tgcaacctctgccttcgggg

SEQ ID NO: 7442 - DNA, 20 bp, Artificial Sequence
  Description of Artificial Sequence: Synthetic oligonucleotide
gcaacctctgccttcggggc

SEQ ID NO: 7443 - DNA, 20 bp, Artificial Sequence
  Description of Artificial Sequence: Synthetic oligonucleotide
caacctctgccttcggggct

SEQ ID NO: 7444 - DNA, 20 bp, Artificial Sequence
  Description of Artificial Sequence: Synthetic oligonucleotide
aacctctgccttcggggctc

SEQ ID NO: 7445 - DNA, 20 bp, Artificial Sequence
  Description of Artificial Sequence: Synthetic oligonucleotide
acctctgccttcggggctca

SEQ ID NO: 7446 - DNA, 20 bp, Artificial Sequence
  Description of Artificial Sequence: Synthetic oligonucleotide
cctctgccttcggggctcaa

SEQ ID NO: 7447 - DNA, 20 bp, Artificial Sequence
  Description of Artificial Sequence: Synthetic oligonucleotide
ctctgccttcggggctcaag

SEQ ID NO: 7448 - DNA, 20 bp, Artificial Sequence
  Description of Artificial Sequence: Synthetic oligonucleotide
tctgccttcggggctcaagc

SEQ ID NO: 7449 - DNA, 20 bp, Artificial Sequence
  Description of Artificial Sequence: Synthetic oligonucleotide
ctgccttcggggctcaagcg

SEQ ID NO: 7450 - DNA, 20 bp, Artificial Sequence
  Description of Artificial Sequence: Synthetic oligonucleotide
tgccttcggggctcaagcga

SEQ ID NO: 7451 - DNA, 20 bp, Artificial Sequence
  Description of Artificial Sequence: Synthetic oligonucleotide
gccttcggggctcaagcgat

SEQ ID NO: 7452 - DNA, 20 bp, Artificial Sequence
  Description of Artificial Sequence: Synthetic oligonucleotide
ccttcggggctcaagcgatt

SEQ ID NO: 7453 - DNA, 20 bp, Artificial Sequence
  Description of Artificial Sequence: Synthetic oligonucleotide
cttcggggctcaagcgattc

SEQ ID NO: 7454 - DNA, 20 bp, Artificial Sequence
  Description of Artificial Sequence: Synthetic oligonucleotide
ttcggggctcaagcgattct

SEQ ID NO: 7455 - DNA, 20 bp, Artificial Sequence
  Description of Artificial Sequence: Synthetic oligonucleotide
tcggggctcaagcgattctt

SEQ ID NO: 7456 - DNA, 20 bp, Artificial Sequence
  Description of Artificial Sequence: Synthetic oligonucleotide
cggggctcaagcgattcttg

SEQ ID NO: 7457 - DNA, 20 bp, Artificial Sequence
  Description of Artificial Sequence: Synthetic oligonucleotide
ggggctcaagcgattcttgt

SEQ ID NO: 7458 - DNA, 20 bp, Artificial Sequence
  Description of Artificial Sequence: Synthetic oligonucleotide
gggctcaagcgattcttgtg

SEQ ID NO: 7459 - DNA, 20 bp, Artificial Sequence
  Description of Artificial Sequence: Synthetic oligonucleotide
ggctcaagcgattcttgtgc

SEQ ID NO: 7460 - DNA, 20 bp, Artificial Sequence
  Description of Artificial Sequence: Synthetic oligonucleotide
gctcaagcgattcttgtgct

SEQ ID NO: 7461 - DNA, 20 bp, Artificial Sequence
  Description of Artificial Sequence: Synthetic oligonucleotide
ctcaagcgattcttgtgctt

SEQ ID NO: 7462 - DNA, 20 bp, Artificial Sequence
  Description of Artificial Sequence: Synthetic oligonucleotide
tcaagcgattcttgtgcttc

SEQ ID NO: 7463 - DNA, 20 bp, Artificial Sequence
  Description of Artificial Sequence: Synthetic oligonucleotide
caagcgattcttgtgcttca

SEQ ID NO: 7464 - DNA, 20 bp, Artificial Sequence
  Description of Artificial Sequence: Synthetic oligonucleotide
aagcgattcttgtgcttcag

SEQ ID NO: 7465 - DNA, 20 bp, Artificial Sequence
  Description of Artificial Sequence: Synthetic oligonucleotide
agcgattcttgtgcttcagc

SEQ ID NO: 7466 - DNA, 20 bp, Artificial Sequence
  Description of Artificial Sequence: Synthetic oligonucleotide
gcgattcttgtgcttcagcc

SEQ ID NO: 7467 - DNA, 20 bp, Artificial Sequence
  Description of Artificial Sequence: Synthetic oligonucleotide
cgattcttgtgcttcagccc

SEQ ID NO: 7468 - DNA, 20 bp, Artificial Sequence
  Description of Artificial Sequence: Synthetic oligonucleotide
gattcttgtgcttcagcccc

SEQ ID NO: 7469 - DNA, 20 bp, Artificial Sequence
  Description of Artificial Sequence: Synthetic oligonucleotide
attcttgtgcttcagcccca

SEQ ID NO: 7470 - DNA, 20 bp, Artificial Sequence
  Description of Artificial Sequence: Synthetic oligonucleotide
ttcttgtgcttcagccccac

SEQ ID NO: 7471 - DNA, 20 bp, Artificial Sequence
  Description of Artificial Sequence: Synthetic oligonucleotide
tcttgtgcttcagccccaca

SEQ ID NO: 7472 - DNA, 20 bp, Artificial Sequence
  Description of Artificial Sequence: Synthetic oligonucleotide
cttgtgcttcagccccacaa

SEQ ID NO: 7473 - DNA, 20 bp, Artificial Sequence
  Description of Artificial Sequence: Synthetic oligonucleotide
ttgtgcttcagccccacaag

SEQ ID NO: 7474 - DNA, 20 bp, Artificial Sequence
  Description of Artificial Sequence: Synthetic oligonucleotide
tgtgcttcagccccacaagc

SEQ ID NO: 7475 - DNA, 20 bp, Artificial Sequence
  Description of Artificial Sequence: Synthetic oligonucleotide
gtgcttcagccccacaagca

SEQ ID NO: 7476 - DNA, 20 bp, Artificial Sequence
  Description of Artificial Sequence: Synthetic oligonucleotide
tgcttcagccccacaagcag

SEQ ID NO: 7477 - DNA, 20 bp, Artificial Sequence
  Description of Artificial Sequence: Synthetic oligonucleotide
gcttcagccccacaagcagc

SEQ ID NO: 7478 - DNA, 20 bp, Artificial Sequence
  Description of Artificial Sequence: Synthetic oligonucleotide
cttcagccccacaagcagct

SEQ ID NO: 7479 - DNA, 20 bp, Artificial Sequence
  Description of Artificial Sequence: Synthetic oligonucleotide
ttcagccccacaagcagctg

SEQ ID NO: 7480 - DNA, 20 bp, Artificial Sequence
  Description of Artificial Sequence: Synthetic oligonucleotide
tcagccccacaagcagctgg

SEQ ID NO: 7481 - DNA, 20 bp, Artificial Sequence
  Description of Artificial Sequence: Synthetic oligonucleotide
cagccccacaagcagctgga

SEQ ID NO: 7482 - DNA, 20 bp, Artificial Sequence
  Description of Artificial Sequence: Synthetic oligonucleotide
agccccacaagcagctggaa

SEQ ID NO: 7483 - DNA, 20 bp, Artificial Sequence
  Description of Artificial Sequence: Synthetic oligonucleotide
gccccacaagcagctggaat

SEQ ID NO: 7484 - DNA, 20 bp, Artificial Sequence
  Description of Artificial Sequence: Synthetic oligonucleotide
ccccacaagcagctggaatc

SEQ ID NO: 7485 - DNA, 20 bp, Artificial Sequence
  Description of Artificial Sequence: Synthetic oligonucleotide
cccacaagcagctggaatca

SEQ ID NO: 7486 - DNA, 20 bp, Artificial Sequence
  Description of Artificial Sequence: Synthetic oligonucleotide
ccacaagcagctggaatcac

SEQ ID NO: 7487 - DNA, 20 bp, Artificial Sequence
  Description of Artificial Sequence: Synthetic oligonucleotide
cacaagcagctggaatcaca

SEQ ID NO: 7488 - DNA, 20 bp, Artificial Sequence
  Description of Artificial Sequence: Synthetic oligonucleotide
acaagcagctggaatcacag

SEQ ID NO: 7489 - DNA, 20 bp, Artificial Sequence
  Description of Artificial Sequence: Synthetic oligonucleotide
caagcagctggaatcacagg

SEQ ID NO: 7490 - DNA, 20 bp, Artificial Sequence
  Description of Artificial Sequence: Synthetic oligonucleotide
aagcagctggaatcacaggc

SEQ ID NO: 7491 - DNA, 20 bp, Artificial Sequence
  Description of Artificial Sequence: Synthetic oligonucleotide
agcagctggaatcacaggca

SEQ ID NO: 7492 - DNA, 20 bp, Artificial Sequence
  Description of Artificial Sequence: Synthetic oligonucleotide
gcagctggaatcacaggcac

SEQ ID NO: 7493 - DNA, 20 bp, Artificial Sequence
  Description of Artificial Sequence: Synthetic oligonucleotide
cagctggaatcacaggcacg

SEQ ID NO: 7494 - DNA, 20 bp, Artificial Sequence
  Description of Artificial Sequence: Synthetic oligonucleotide
agctggaatcacaggcacgc

SEQ ID NO: 7495 - DNA, 20 bp, Artificial Sequence
  Description of Artificial Sequence: Synthetic oligonucleotide
gctggaatcacaggcacgcc

SEQ ID NO: 7496 - DNA, 20 bp, Artificial Sequence
  Description of Artificial Sequence: Synthetic oligonucleotide
ctggaatcacaggcacgccc

SEQ ID NO: 7497 - DNA, 20 bp, Artificial Sequence
  Description of Artificial Sequence: Synthetic oligonucleotide
tggaatcacaggcacgcccg

SEQ ID NO: 7498 - DNA, 20 bp, Artificial Sequence
  Description of Artificial Sequence: Synthetic oligonucleotide
ggaatcacaggcacgcccgg

SEQ ID NO: 7499 - DNA, 20 bp, Artificial Sequence
  Description of Artificial Sequence: Synthetic oligonucleotide
gaatcacaggcacgcccggc

SEQ ID NO: 7500 - DNA, 20 bp, Artificial Sequence
  Description of Artificial Sequence: Synthetic oligonucleotide
aatcacaggcacgcccggct

SEQ ID NO: 7501 - DNA, 20 bp, Artificial Sequence
  Description of Artificial Sequence: Synthetic oligonucleotide
atcacaggcacgcccggcta

SEQ ID NO: 7502 - DNA, 20 bp, Artificial Sequence
  Description of Artificial Sequence: Synthetic oligonucleotide
tcacaggcacgcccggctaa

SEQ ID NO: 7503 - DNA, 20 bp, Artificial Sequence
  Description of Artificial Sequence: Synthetic oligonucleotide
cacaggcacgcccggctaat

SEQ ID NO: 7504 - DNA, 20 bp, Artificial Sequence
  Description of Artificial Sequence: Synthetic oligonucleotide
acaggcacgcccggctaatg

SEQ ID NO: 7505 - DNA, 20 bp, Artificial Sequence
  Description of Artificial Sequence: Synthetic oligonucleotide
caggcacgcccggctaatgt

SEQ ID NO: 7506 - DNA, 20 bp, Artificial Sequence
  Description of Artificial Sequence: Synthetic oligonucleotide
aggcacgcccggctaatgtt

SEQ ID NO: 7507 - DNA, 20 bp, Artificial Sequence
  Description of Artificial Sequence: Synthetic oligonucleotide
ggcacgcccggctaatgttt

SEQ ID NO: 7508 - DNA, 20 bp, Artificial Sequence
  Description of Artificial Sequence: Synthetic oligonucleotide
gcacgcccggctaatgttta

SEQ ID NO: 7509 - DNA, 20 bp, Artificial Sequence
  Description of Artificial Sequence: Synthetic oligonucleotide
cacgcccggctaatgtttat

SEQ ID NO: 7510 - DNA, 20 bp, Artificial Sequence
  Description of Artificial Sequence: Synthetic oligonucleotide
acgcccggctaatgtttatg

SEQ ID NO: 7511 - DNA, 20 bp, Artificial Sequence
  Description of Artificial Sequence: Synthetic oligonucleotide
cgcccggctaatgtttatgt

SEQ ID NO: 7512 - DNA, 20 bp, Artificial Sequence
  Description of Artificial Sequence: Synthetic oligonucleotide
gcccggctaatgtttatgtt

SEQ ID NO: 7513 - DNA, 20 bp, Artificial Sequence
  Description of Artificial Sequence: Synthetic oligonucleotide
cccggctaatgtttatgttg

SEQ ID NO: 7514 - DNA, 20 bp, Artificial Sequence
  Description of Artificial Sequence: Synthetic oligonucleotide
ccggctaatgtttatgttgg

SEQ ID NO: 7515 - DNA, 20 bp, Artificial Sequence
  Description of Artificial Sequence: Synthetic oligonucleotide
cggctaatgtttatgttggt

SEQ ID NO: 7516 - DNA, 20 bp, Artificial Sequence
  Description of Artificial Sequence: Synthetic oligonucleotide
ggctaatgtttatgttggta

SEQ ID NO: 7517 - DNA, 20 bp, Artificial Sequence
  Description of Artificial Sequence: Synthetic oligonucleotide
gctaatgtttatgttggtag

SEQ ID NO: 7518 - DNA, 20 bp, Artificial Sequence
  Description of Artificial Sequence: Synthetic oligonucleotide
ctaatgtttatgttggtaga

SEQ ID NO: 7519 - DNA, 20 bp, Artificial Sequence
  Description of Artificial Sequence: Synthetic oligonucleotide
taatgtttatgttggtagag

SEQ ID NO: 7520 - DNA, 20 bp, Artificial Sequence
  Description of Artificial Sequence: Synthetic oligonucleotide
aatgtttatgttggtagaga

SEQ ID NO: 7521 - DNA, 20 bp, Artificial Sequence
  Description of Artificial Sequence: Synthetic oligonucleotide
atgtttatgttggtagagat

SEQ ID NO: 7522 - DNA, 20 bp, Artificial Sequence
  Description of Artificial Sequence: Synthetic oligonucleotide
tgtttatgttggtagagata

SEQ ID NO: 7523 - DNA, 20 bp, Artificial Sequence
  Description of Artificial Sequence: Synthetic oligonucleotide
gtttatgttggtagagatag

SEQ ID NO: 7524 - DNA, 20 bp, Artificial Sequence
  Description of Artificial Sequence: Synthetic oligonucleotide
tttatgttggtagagatagg

SEQ ID NO: 7525 - DNA, 20 bp, Artificial Sequence
  Description of Artificial Sequence: Synthetic oligonucleotide
ttatgttggtagagataggg

SEQ ID NO: 7526 - DNA, 20 bp, Artificial Sequence
  Description of Artificial Sequence: Synthetic oligonucleotide
tatgttggtagagatagggt

SEQ ID NO: 7527 - DNA, 20 bp, Artificial Sequence
  Description of Artificial Sequence: Synthetic oligonucleotide
atgttggtagagatagggtt

SEQ ID NO: 7528 - DNA, 20 bp, Artificial Sequence
  Description of Artificial Sequence: Synthetic oligonucleotide
tgttggtagagatagggttt

SEQ ID NO: 7529 - DNA, 20 bp, Artificial Sequence
  Description of Artificial Sequence: Synthetic oligonucleotide
gttggtagagatagggtttc

SEQ ID NO: 7530 - DNA, 20 bp, Artificial Sequence
  Description of Artificial Sequence: Synthetic oligonucleotide
ttggtagagatagggtttca

SEQ ID NO: 7531 - DNA, 20 bp, Artificial Sequence
  Description of Artificial Sequence: Synthetic oligonucleotide
tggtagagatagggtttcac

SEQ ID NO: 7532 - DNA, 20 bp, Artificial Sequence
  Description of Artificial Sequence: Synthetic oligonucleotide
ggtagagatagggtttcacc

SEQ ID NO: 7533 - DNA, 20 bp, Artificial Sequence
  Description of Artificial Sequence: Synthetic oligonucleotide
gtagagatagggtttcacca

SEQ ID NO: 7534 - DNA, 20 bp, Artificial Sequence
  Description of Artificial Sequence: Synthetic oligonucleotide
tagagatagggtttcaccat

SEQ ID NO: 7535 - DNA, 20 bp, Artificial Sequence
  Description of Artificial Sequence: Synthetic oligonucleotide
agagatagggtttcaccatg

SEQ ID NO: 7536 - DNA, 20 bp, Artificial Sequence
  Description of Artificial Sequence: Synthetic oligonucleotide
gagatagggtttcaccatgt

SEQ ID NO: 7537 - DNA, 20 bp, Artificial Sequence
  Description of Artificial Sequence: Synthetic oligonucleotide
agatagggtttcaccatgtt

SEQ ID NO: 7538 - DNA, 20 bp, Artificial Sequence
  Description of Artificial Sequence: Synthetic oligonucleotide
gatagggtttcaccatgttg

SEQ ID NO: 7539 - DNA, 20 bp, Artificial Sequence
  Description of Artificial Sequence: Synthetic oligonucleotide
atagggtttcaccatgttgg

SEQ ID NO: 7540 - DNA, 20 bp, Artificial Sequence
  Description of Artificial Sequence: Synthetic oligonucleotide
tagggtttcaccatgttggc

SEQ ID NO: 7541 - DNA, 20 bp, Artificial Sequence
  Description of Artificial Sequence: Synthetic oligonucleotide
agggtttcaccatgttggcc

SEQ ID NO: 7542 - DNA, 20 bp, Artificial Sequence
  Description of Artificial Sequence: Synthetic oligonucleotide
gggtttcaccatgttggcca

SEQ ID NO: 7543 - DNA, 20 bp, Artificial Sequence
  Description of Artificial Sequence: Synthetic oligonucleotide
ggtttcaccatgttggccag

SEQ ID NO: 7544 - DNA, 20 bp, Artificial Sequence
  Description of Artificial Sequence: Synthetic oligonucleotide
gtttcaccatgttggccagg

SEQ ID NO: 7545 - DNA, 20 bp, Artificial Sequence
  Description of Artificial Sequence: Synthetic oligonucleotide
tttcaccatgttggccaggc

SEQ ID NO: 7546 - DNA, 20 bp, Artificial Sequence
  Description of Artificial Sequence: Synthetic oligonucleotide
ttcaccatgttggccaggct

SEQ ID NO: 7547 - DNA, 20 bp, Artificial Sequence
  Description of Artificial Sequence: Synthetic oligonucleotide
tcaccatgttggccaggctg

SEQ ID NO: 7548 - DNA, 20 bp, Artificial Sequence
  Description of Artificial Sequence: Synthetic oligonucleotide
caccatgttggccaggctgg

SEQ ID NO: 7549 - DNA, 20 bp, Artificial Sequence
  Description of Artificial Sequence: Synthetic oligonucleotide
accatgttggccaggctggt

SEQ ID NO: 7550 - DNA, 20 bp, Artificial Sequence
  Description of Artificial Sequence: Synthetic oligonucleotide
ccatgttggccaggctggtc

SEQ ID NO: 7551 - DNA, 20 bp, Artificial Sequence
  Description of Artificial Sequence: Synthetic oligonucleotide
catgttggccaggctggtct

SEQ ID NO: 7552 - DNA, 20 bp, Artificial Sequence
  Description of Artificial Sequence: Synthetic oligonucleotide
atgttggccaggctggtctt

SEQ ID NO: 7553 - DNA, 20 bp, Artificial Sequence
  Description of Artificial Sequence: Synthetic oligonucleotide
tgttggccaggctggtcttg

SEQ ID NO: 7554 - DNA, 20 bp, Artificial Sequence
  Description of Artificial Sequence: Synthetic oligonucleotide
gttggccaggctggtcttga

SEQ ID NO: 7555 - DNA, 20 bp, Artificial Sequence
  Description of Artificial Sequence: Synthetic oligonucleotide
ttggccaggctggtcttgaa

SEQ ID NO: 7556 - DNA, 20 bp, Artificial Sequence
  Description of Artificial Sequence: Synthetic oligonucleotide
tggccaggctggtcttgaac

SEQ ID NO: 7557 - DNA, 20 bp, Artificial Sequence
  Description of Artificial Sequence: Synthetic oligonucleotide
ggccaggctggtcttgaact

SEQ ID NO: 7558 - DNA, 20 bp, Artificial Sequence
  Description of Artificial Sequence: Synthetic oligonucleotide
gccaggctggtcttgaactt

SEQ ID NO: 7559 - DNA, 20 bp, Artificial Sequence
  Description of Artificial Sequence: Synthetic oligonucleotide
ccaggctggtcttgaacttc

SEQ ID NO: 7560 - DNA, 20 bp, Artificial Sequence
  Description of Artificial Sequence: Synthetic oligonucleotide
caggctggtcttgaacttct

SEQ ID NO: 7561 - DNA, 20 bp, Artificial Sequence
  Description of Artificial Sequence: Synthetic oligonucleotide
aggctggtcttgaacttctg

SEQ ID NO: 7562 - DNA, 20 bp, Artificial Sequence
  Description of Artificial Sequence: Synthetic oligonucleotide
ggctggtcttgaacttctga

SEQ ID NO: 7563 - DNA, 20 bp, Artificial Sequence
  Description of Artificial Sequence: Synthetic oligonucleotide
gctggtcttgaacttctgac

SEQ ID NO: 7564 - DNA, 20 bp, Artificial Sequence
  Description of Artificial Sequence: Synthetic oligonucleotide
ctggtcttgaacttctgacc

SEQ ID NO: 7565 - DNA, 20 bp, Artificial Sequence
  Description of Artificial Sequence: Synthetic oligonucleotide
tggtcttgaacttctgacct

SEQ ID NO: 7566 - DNA, 20 bp, Artificial Sequence
  Description of Artificial Sequence: Synthetic oligonucleotide
ggtcttgaacttctgacctc

SEQ ID NO: 7567 - DNA, 20 bp, Artificial Sequence
  Description of Artificial Sequence: Synthetic oligonucleotide
gtcttgaacttctgacctca

SEQ ID NO: 7568 - DNA, 20 bp, Artificial Sequence
  Description of Artificial Sequence: Synthetic oligonucleotide
tcttgaacttctgacctcaa

SEQ ID NO: 7569 - DNA, 20 bp, Artificial Sequence
  Description of Artificial Sequence: Synthetic oligonucleotide
cttgaacttctgacctcaag

SEQ ID NO: 7570 - DNA, 20 bp, Artificial Sequence
  Description of Artificial Sequence: Synthetic oligonucleotide
ttgaacttctgacctcaagt

SEQ ID NO: 7571 - DNA, 20 bp, Artificial Sequence
  Description of Artificial Sequence: Synthetic oligonucleotide
tgaacttctgacctcaagtg

SEQ ID NO: 7572 - DNA, 20 bp, Artificial Sequence
  Description of Artificial Sequence: Synthetic oligonucleotide
gaacttctgacctcaagtga

SEQ ID NO: 7573 - DNA, 20 bp, Artificial Sequence
  Description of Artificial Sequence: Synthetic oligonucleotide
aacttctgacctcaagtgat

SEQ ID NO: 7574 - DNA, 20 bp, Artificial Sequence
  Description of Artificial Sequence: Synthetic oligonucleotide
acttctgacctcaagtgatt

SEQ ID NO: 7575 - DNA, 20 bp, Artificial Sequence
  Description of Artificial Sequence: Synthetic oligonucleotide
cttctgacctcaagtgattt

SEQ ID NO: 7576 - DNA, 20 bp, Artificial Sequence
  Description of Artificial Sequence: Synthetic oligonucleotide
ttctgacctcaagtgatttg

SEQ ID NO: 7577 - DNA, 20 bp, Artificial Sequence
  Description of Artificial Sequence: Synthetic oligonucleotide
tctgacctcaagtgatttgc

SEQ ID NO: 7578 - DNA, 20 bp, Artificial Sequence
  Description of Artificial Sequence: Synthetic oligonucleotide
ctgacctcaagtgatttgcc

SEQ ID NO: 7579 - DNA, 20 bp, Artificial Sequence
  Description of Artificial Sequence: Synthetic oligonucleotide
tgacctcaagtgatttgccc

SEQ ID NO: 7580 - DNA, 20 bp, Artificial Sequence
  Description of Artificial Sequence: Synthetic oligonucleotide
gacctcaagtgatttgcccg

SEQ ID NO: 7581 - DNA, 20 bp, Artificial Sequence
  Description of Artificial Sequence: Synthetic oligonucleotide
acctcaagtgatttgcccgc

SEQ ID NO: 7582 - DNA, 20 bp, Artificial Sequence
  Description of Artificial Sequence: Synthetic oligonucleotide
cctcaagtgatttgcccgcc

SEQ ID NO: 7583 - DNA, 20 bp, Artificial Sequence
  Description of Artificial Sequence: Synthetic oligonucleotide
ctcaagtgatttgcccgcct

SEQ ID NO: 7584 - DNA, 20 bp, Artificial Sequence
  Description of Artificial Sequence: Synthetic oligonucleotide
tcaagtgatttgcccgcctc

SEQ ID NO: 7585 - DNA, 20 bp, Artificial Sequence
  Description of Artificial Sequence: Synthetic oligonucleotide
caagtgatttgcccgcctca

SEQ ID NO: 7586 - DNA, 20 bp, Artificial Sequence
  Description of Artificial Sequence: Synthetic oligonucleotide
aagtgatttgcccgcctcag

SEQ ID NO: 7587 - DNA, 20 bp, Artificial Sequence
  Description of Artificial Sequence: Synthetic oligonucleotide
agtgatttgcccgcctcagc

SEQ ID NO: 7588 - DNA, 20 bp, Artificial Sequence
  Description of Artificial Sequence: Synthetic oligonucleotide
gtgatttgcccgcctcagcc

SEQ ID NO: 7589 - DNA, 20 bp, Artificial Sequence
  Description of Artificial Sequence: Synthetic oligonucleotide
tgatttgcccgcctcagcct

SEQ ID NO: 7590 - DNA, 20 bp, Artificial Sequence
  Description of Artificial Sequence: Synthetic oligonucleotide
gatttgcccgcctcagcctc

SEQ ID NO: 7591 - DNA, 20 bp, Artificial Sequence
  Description of Artificial Sequence: Synthetic oligonucleotide
atttgcccgcctcagcctcc

SEQ ID NO: 7592 - DNA, 20 bp, Artificial Sequence
  Description of Artificial Sequence: Synthetic oligonucleotide
tttgcccgcctcagcctccc

SEQ ID NO: 7593 - DNA, 20 bp, Artificial Sequence
  Description of Artificial Sequence: Synthetic oligonucleotide
ttgcccgcctcagcctccca

SEQ ID NO: 7594 - DNA, 20 bp, Artificial Sequence
  Description of Artificial Sequence: Synthetic oligonucleotide
tgcccgcctcagcctcccaa

SEQ ID NO: 7595 - DNA, 20 bp, Artificial Sequence
  Description of Artificial Sequence: Synthetic oligonucleotide
gcccgcctcagcctcccaaa

SEQ ID NO: 7596 - DNA, 20 bp, Artificial Sequence
  Description of Artificial Sequence: Synthetic oligonucleotide
cccgcctcagcctcccaaag

SEQ ID NO: 7597 - DNA, 20 bp, Artificial Sequence
  Description of Artificial Sequence: Synthetic oligonucleotide
ccgcctcagcctcccaaagt

SEQ ID NO: 7598 - DNA, 20 bp, Artificial Sequence
  Description of Artificial Sequence: Synthetic oligonucleotide
cgcctcagcctcccaaagtg

SEQ ID NO: 7599 - DNA, 20 bp, Artificial Sequence
  Description of Artificial Sequence: Synthetic oligonucleotide
gcctcagcctcccaaagtgc

SEQ ID NO: 7600 - DNA, 20 bp, Artificial Sequence
  Description of Artificial Sequence: Synthetic oligonucleotide
cctcagcctcccaaagtgct

SEQ ID NO: 7601 - DNA, 20 bp, Artificial Sequence
  Description of Artificial Sequence: Synthetic oligonucleotide
ctcagcctcccaaagtgctg

SEQ ID NO: 7602 - DNA, 20 bp, Artificial Sequence
  Description of Artificial Sequence: Synthetic oligonucleotide
tcagcctcccaaagtgctgg

SEQ ID NO: 7603 - DNA, 20 bp, Artificial Sequence
  Description of Artificial Sequence: Synthetic oligonucleotide
cagcctcccaaagtgctggc

SEQ ID NO: 7604 - DNA, 20 bp, Artificial Sequence
  Description of Artificial Sequence: Synthetic oligonucleotide
agcctcccaaagtgctggca

SEQ ID NO: 7605 - DNA, 20 bp, Artificial Sequence
  Description of Artificial Sequence: Synthetic oligonucleotide
gcctcccaaagtgctggcat

SEQ ID NO: 7606 - DNA, 20 bp, Artificial Sequence
  Description of Artificial Sequence: Synthetic oligonucleotide
cctcccaaagtgctggcatt

SEQ ID NO: 7607 - DNA, 20 bp, Artificial Sequence
  Description of Artificial Sequence: Synthetic oligonucleotide
ctcccaaagtgctggcattt

SEQ ID NO: 7608 - DNA, 20 bp, Artificial Sequence
  Description of Artificial Sequence: Synthetic oligonucleotide
tcccaaagtgctggcatttc

SEQ ID NO: 7609 - DNA, 20 bp, Artificial Sequence
  Description of Artificial Sequence: Synthetic oligonucleotide
cccaaagtgctggcatttca

SEQ ID NO: 7610 - DNA, 20 bp, Artificial Sequence
  Description of Artificial Sequence: Synthetic oligonucleotide
ccaaagtgctggcatttcag

SEQ ID NO: 7611 - DNA, 20 bp, Artificial Sequence
  Description of Artificial Sequence: Synthetic oligonucleotide
caaagtgctggcatttcagg

SEQ ID NO: 7612 - DNA, 20 bp, Artificial Sequence
  Description of Artificial Sequence: Synthetic oligonucleotide
aaagtgctggcatttcaggt

SEQ ID NO: 7613 - DNA, 20 bp, Artificial Sequence
  Description of Artificial Sequence: Synthetic oligonucleotide
aagtgctggcatttcaggtg

SEQ ID NO: 7614 - DNA, 20 bp, Artificial Sequence
  Description of Artificial Sequence: Synthetic oligonucleotide
agtgctggcatttcaggtgt

SEQ ID NO: 7615 - DNA, 20 bp, Artificial Sequence
  Description of Artificial Sequence: Synthetic oligonucleotide
gtgctggcatttcaggtgta

SEQ ID NO: 7616 - DNA, 20 bp, Artificial Sequence
  Description of Artificial Sequence: Synthetic oligonucleotide
tgctggcatttcaggtgtaa

SEQ ID NO: 7617 - DNA, 20 bp, Artificial Sequence
  Description of Artificial Sequence: Synthetic oligonucleotide
gctggcatttcaggtgtaag

SEQ ID NO: 7618 - DNA, 20 bp, Artificial Sequence
  Description of Artificial Sequence: Synthetic oligonucleotide
ctggcatttcaggtgtaagc

SEQ ID NO: 7619 - DNA, 20 bp, Artificial Sequence
  Description of Artificial Sequence: Synthetic oligonucleotide
tggcatttcaggtgtaagcc

SEQ ID NO: 7620 - DNA, 20 bp, Artificial Sequence
  Description of Artificial Sequence: Synthetic oligonucleotide
ggcatttcaggtgtaagcca

SEQ ID NO: 7621 - DNA, 20 bp, Artificial Sequence
  Description of Artificial Sequence: Synthetic oligonucleotide
gcatttcaggtgtaagccac

SEQ ID NO: 7622 - DNA, 20 bp, Artificial Sequence
  Description of Artificial Sequence: Synthetic oligonucleotide
catttcaggtgtaagccacc

SEQ ID NO: 7623 - DNA, 20 bp, Artificial Sequence
  Description of Artificial Sequence: Synthetic oligonucleotide
atttcaggtgtaagccaccg

SEQ ID NO: 7624 - DNA, 20 bp, Artificial Sequence
  Description of Artificial Sequence: Synthetic oligonucleotide
tttcaggtgtaagccaccgt

SEQ ID NO: 7625 - DNA, 20 bp, Artificial Sequence
  Description of Artificial Sequence: Synthetic oligonucleotide
ttcaggtgtaagccaccgtg

SEQ ID NO: 7626 - DNA, 20 bp, Artificial Sequence
  Description of Artificial Sequence: Synthetic oligonucleotide
tcaggtgtaagccaccgtgc

SEQ ID NO: 7627 - DNA, 20 bp, Artificial Sequence
  Description of Artificial Sequence: Synthetic oligonucleotide
caggtgtaagccaccgtgct

SEQ ID NO: 7628 - DNA, 20 bp, Artificial Sequence
  Description of Artificial Sequence: Synthetic oligonucleotide
aggtgtaagccaccgtgctc

SEQ ID NO: 7629 - DNA, 20 bp, Artificial Sequence
  Description of Artificial Sequence: Synthetic oligonucleotide
ggtgtaagccaccgtgctca

SEQ ID NO: 7630 - DNA, 20 bp, Artificial Sequence
  Description of Artificial Sequence: Synthetic oligonucleotide
gtgtaagccaccgtgctcag

SEQ ID NO: 7631 - DNA, 20 bp, Artificial Sequence
  Description of Artificial Sequence: Synthetic oligonucleotide
tgtaagccaccgtgctcagc

SEQ ID NO: 7632 - DNA, 20 bp, Artificial Sequence
  Description of Artificial Sequence: Synthetic oligonucleotide
gtaagccaccgtgctcagcc

SEQ ID NO: 7633 - DNA, 20 bp, Artificial Sequence
  Description of Artificial Sequence: Synthetic oligonucleotide
taagccaccgtgctcagcct

SEQ ID NO: 7634 - DNA, 20 bp, Artificial Sequence
  Description of Artificial Sequence: Synthetic oligonucleotide
aagccaccgtgctcagcctt

SEQ ID NO: 7635 - DNA, 20 bp, Artificial Sequence
  Description of Artificial Sequence: Synthetic oligonucleotide
agccaccgtgctcagccttt

SEQ ID NO: 7636 - DNA, 20 bp, Artificial Sequence
  Description of Artificial Sequence: Synthetic oligonucleotide
gccaccgtgctcagcctttg

SEQ ID NO: 7637 - DNA, 20 bp, Artificial Sequence
  Description of Artificial Sequence: Synthetic oligonucleotide
ccaccgtgctcagcctttgt

SEQ ID NO: 7638 - DNA, 20 bp, Artificial Sequence
  Description of Artificial Sequence: Synthetic oligonucleotide
caccgtgctcagcctttgtt

SEQ ID NO: 7639 - DNA, 20 bp, Artificial Sequence
  Description of Artificial Sequence: Synthetic oligonucleotide
accgtgctcagcctttgttt

SEQ ID NO: 7640 - DNA, 20 bp, Artificial Sequence
  Description of Artificial Sequence: Synthetic oligonucleotide
ccgtgctcagcctttgtttt

SEQ ID NO: 7641 - DNA, 20 bp, Artificial Sequence
  Description of Artificial Sequence: Synthetic oligonucleotide
cgtgctcagcctttgttttt

SEQ ID NO: 7642 - DNA, 20 bp, Artificial Sequence
  Description of Artificial Sequence: Synthetic oligonucleotide
gtgctcagcctttgtttttt

SEQ ID NO: 7643 - DNA, 20 bp, Artificial Sequence
  Description of Artificial Sequence: Synthetic oligonucleotide
tgctcagcctttgttttttt

SEQ ID NO: 7644 - DNA, 20 bp, Artificial Sequence
  Description of Artificial Sequence: Synthetic oligonucleotide
gctcagcctttgtttttttt

SEQ ID NO: 7645 - DNA, 20 bp, Artificial Sequence
  Description of Artificial Sequence: Synthetic oligonucleotide
ctcagcctttgttttttttt

SEQ ID NO: 7646 - DNA, 20 bp, Artificial Sequence
  Description of Artificial Sequence: Synthetic oligonucleotide
tcagcctttgttttttttta

SEQ ID NO: 7647 - DNA, 20 bp, Artificial Sequence
  Description of Artificial Sequence: Synthetic oligonucleotide
cagcctttgtttttttttag

SEQ ID NO: 7648 - DNA, 20 bp, Artificial Sequence
  Description of Artificial Sequence: Synthetic oligonucleotide
agcctttgtttttttttaga

SEQ ID NO: 7649 - DNA, 20 bp, Artificial Sequence
  Description of Artificial Sequence: Synthetic oligonucleotide
gcctttgtttttttttagaa

SEQ ID NO: 7650 - DNA, 20 bp, Artificial Sequence
  Description of Artificial Sequence: Synthetic oligonucleotide
cctttgtttttttttagaaa

SEQ ID NO: 7651 - DNA, 20 bp, Artificial Sequence
  Description of Artificial Sequence: Synthetic oligonucleotide
ctttgtttttttttagaaac

SEQ ID NO: 7652 - DNA, 20 bp, Artificial Sequence
  Description of Artificial Sequence: Synthetic oligonucleotide
tttgtttttttttagaaacg

SEQ ID NO: 7653 - DNA, 20 bp, Artificial Sequence
  Description of Artificial Sequence: Synthetic oligonucleotide
ttgtttttttttagaaacga

SEQ ID NO: 7654 - DNA, 20 bp, Artificial Sequence
  Description of Artificial Sequence: Synthetic oligonucleotide
tgtttttttttagaaacgag

SEQ ID NO: 7655 - DNA, 20 bp, Artificial Sequence
  Description of Artificial Sequence: Synthetic oligonucleotide
gtttttttttagaaacgagg

SEQ ID NO: 7656 - DNA, 20 bp, Artificial Sequence
  Description of Artificial Sequence: Synthetic oligonucleotide
tttttttttagaaacgaggt

SEQ ID NO: 7657 - DNA, 20 bp, Artificial Sequence
  Description of Artificial Sequence: Synthetic oligonucleotide
ttttttttagaaacgaggtt

SEQ ID NO: 7658 - DNA, 20 bp, Artificial Sequence
  Description of Artificial Sequence: Synthetic oligonucleotide
tttttttagaaacgaggttt

SEQ ID NO: 7659 - DNA, 20 bp, Artificial Sequence
  Description of Artificial Sequence: Synthetic oligonucleotide
ttttttagaaacgaggtttt

SEQ ID NO: 7660 - DNA, 20 bp, Artificial Sequence
  Description of Artificial Sequence: Synthetic oligonucleotide
tttttagaaacgaggttttg

SEQ ID NO: 7661 - DNA, 20 bp, Artificial Sequence
  Description of Artificial Sequence: Synthetic oligonucleotide
ttttagaaacgaggttttgt

SEQ ID NO: 7662 - DNA, 20 bp, Artificial Sequence
  Description of Artificial Sequence: Synthetic oligonucleotide
tttagaaacgaggttttgtt

SEQ ID NO: 7663 - DNA, 20 bp, Artificial Sequence
  Description of Artificial Sequence: Synthetic oligonucleotide
ttagaaacgaggttttgttg

SEQ ID NO: 7664 - DNA, 20 bp, Artificial Sequence
  Description of Artificial Sequence: Synthetic oligonucleotide
tagaaacgaggttttgttgt

SEQ ID NO: 7665 - DNA, 20 bp, Artificial Sequence
  Description of Artificial Sequence: Synthetic oligonucleotide
agaaacgaggttttgttgtg

SEQ ID NO: 7666 - DNA, 20 bp, Artificial Sequence
  Description of Artificial Sequence: Synthetic oligonucleotide
gaaacgaggttttgttgtgt

SEQ ID NO: 7667 - DNA, 20 bp, Artificial Sequence
  Description of Artificial Sequence: Synthetic oligonucleotide
aaacgaggttttgttgtgtt

SEQ ID NO: 7668 - DNA, 20 bp, Artificial Sequence
  Description of Artificial Sequence: Synthetic oligonucleotide
aacgaggttttgttgtgttg

SEQ ID NO: 7669 - DNA, 20 bp, Artificial Sequence
  Description of Artificial Sequence: Synthetic oligonucleotide
acgaggttttgttgtgttgc

SEQ ID NO: 7670 - DNA, 20 bp, Artificial Sequence
  Description of Artificial Sequence: Synthetic oligonucleotide
cgaggttttgttgtgttgcc

SEQ ID NO: 7671 - DNA, 20 bp, Artificial Sequence
  Description of Artificial Sequence: Synthetic oligonucleotide
gaggttttgttgtgttgccc

SEQ ID NO: 7672 - DNA, 20 bp, Artificial Sequence
  Description of Artificial Sequence: Synthetic oligonucleotide
aggttttgttgtgttgccca

SEQ ID NO: 7673 - DNA, 20 bp, Artificial Sequence
  Description of Artificial Sequence: Synthetic oligonucleotide
ggttttgttgtgttgcccag

SEQ ID NO: 7674 - DNA, 20 bp, Artificial Sequence
  Description of Artificial Sequence: Synthetic oligonucleotide
gttttgttgtgttgcccagg

SEQ ID NO: 7675 - DNA, 20 bp, Artificial Sequence
  Description of Artificial Sequence: Synthetic oligonucleotide
ttttgttgtgttgcccaggt

SEQ ID NO: 7676 - DNA, 20 bp, Artificial Sequence
  Description of Artificial Sequence: Synthetic oligonucleotide
tttgttgtgttgcccaggtt

SEQ ID NO: 7677 - DNA, 20 bp, Artificial Sequence
  Description of Artificial Sequence: Synthetic oligonucleotide
ttgttgtgttgcccaggttg

SEQ ID NO: 7678 - DNA, 20 bp, Artificial Sequence
  Description of Artificial Sequence: Synthetic oligonucleotide
tgttgtgttgcccaggttgg

SEQ ID NO: 7679 - DNA, 20 bp, Artificial Sequence
  Description of Artificial Sequence: Synthetic oligonucleotide
gttgtgttgcccaggttgga

SEQ ID NO: 7680 - DNA, 20 bp, Artificial Sequence
  Description of Artificial Sequence: Synthetic oligonucleotide
ttgtgttgcccaggttggag

SEQ ID NO: 7681 - DNA, 20 bp, Artificial Sequence
  Description of Artificial Sequence: Synthetic oligonucleotide
tgtgttgcccaggttggagt

SEQ ID NO: 7682 - DNA, 20 bp, Artificial Sequence
  Description of Artificial Sequence: Synthetic oligonucleotide
gtgttgcccaggttggagtg

SEQ ID NO: 7683 - DNA, 20 bp, Artificial Sequence
  Description of Artificial Sequence: Synthetic oligonucleotide
tgttgcccaggttggagtgc

SEQ ID NO: 7684 - DNA, 20 bp, Artificial Sequence
  Description of Artificial Sequence: Synthetic oligonucleotide
gttgcccaggttggagtgcg

SEQ ID NO: 7685 - DNA, 20 bp, Artificial Sequence
  Description of Artificial Sequence: Synthetic oligonucleotide
ttgcccaggttggagtgcgg

SEQ ID NO: 7686 - DNA, 20 bp, Artificial Sequence
  Description of Artificial Sequence: Synthetic oligonucleotide
tgcccaggttggagtgcggt

SEQ ID NO: 7687 - DNA, 20 bp, Artificial Sequence
  Description of Artificial Sequence: Synthetic oligonucleotide
gcccaggttggagtgcggtg

SEQ ID NO: 7688 - DNA, 20 bp, Artificial Sequence
  Description of Artificial Sequence: Synthetic oligonucleotide
cccaggttggagtgcggtgg

SEQ ID NO: 7689 - DNA, 20 bp, Artificial Sequence
  Description of Artificial Sequence: Synthetic oligonucleotide
ccaggttggagtgcggtggc

SEQ ID NO: 7690 - DNA, 20 bp, Artificial Sequence
  Description of Artificial Sequence: Synthetic oligonucleotide
caggttggagtgcggtggct

SEQ ID NO: 7691 - DNA, 20 bp, Artificial Sequence
  Description of Artificial Sequence: Synthetic oligonucleotide
aggttggagtgcggtggcta

SEQ ID NO: 7692 - DNA, 20 bp, Artificial Sequence
  Description of Artificial Sequence: Synthetic oligonucleotide
ggttggagtgcggtggctat

SEQ ID NO: 7693 - DNA, 20 bp, Artificial Sequence
  Description of Artificial Sequence: Synthetic oligonucleotide
gttggagtgcggtggctatt

SEQ ID NO: 7694 - DNA, 20 bp, Artificial Sequence
  Description of Artificial Sequence: Synthetic oligonucleotide
ttggagtgcggtggctattc

SEQ ID NO: 7695 - DNA, 20 bp, Artificial Sequence
  Description of Artificial Sequence: Synthetic oligonucleotide
tggagtgcggtggctattca

SEQ ID NO: 7696 - DNA, 20 bp, Artificial Sequence
  Description of Artificial Sequence: Synthetic oligonucleotide
ggagtgcggtggctattcac

SEQ ID NO: 7697 - DNA, 20 bp, Artificial Sequence
  Description of Artificial Sequence: Synthetic oligonucleotide
gagtgcggtggctattcaca

SEQ ID NO: 7698 - DNA, 20 bp, Artificial Sequence
  Description of Artificial Sequence: Synthetic oligonucleotide
agtgcggtggctattcacag

SEQ ID NO: 7699 - DNA, 20 bp, Artificial Sequence
  Description of Artificial Sequence: Synthetic oligonucleotide
gtgcggtggctattcacagg

SEQ ID NO: 7700 - DNA, 20 bp, Artificial Sequence
  Description of Artificial Sequence: Synthetic oligonucleotide
tgcggtggctattcacaggt

SEQ ID NO: 7701 - DNA, 20 bp, Artificial Sequence
  Description of Artificial Sequence: Synthetic oligonucleotide
gcggtggctattcacaggtg

SEQ ID NO: 7702 - DNA, 20 bp, Artificial Sequence
  Description of Artificial Sequence: Synthetic oligonucleotide
cggtggctattcacaggtgt

SEQ ID NO: 7703 - DNA, 20 bp, Artificial Sequence
  Description of Artificial Sequence: Synthetic oligonucleotide
ggtggctattcacaggtgtg

SEQ ID NO: 7704 - DNA, 20 bp, Artificial Sequence
  Description of Artificial Sequence: Synthetic oligonucleotide
gtggctattcacaggtgtga

SEQ ID NO: 7705 - DNA, 20 bp, Artificial Sequence
  Description of Artificial Sequence: Synthetic oligonucleotide
tggctattcacaggtgtgat

SEQ ID NO: 7706 - DNA, 20 bp, Artificial Sequence
  Description of Artificial Sequence: Synthetic oligonucleotide
ggctattcacaggtgtgatc

SEQ ID NO: 7707 - DNA, 20 bp, Artificial Sequence
  Description of Artificial Sequence: Synthetic oligonucleotide
gctattcacaggtgtgatca

SEQ ID NO: 7708 - DNA, 20 bp, Artificial Sequence
  Description of Artificial Sequence: Synthetic oligonucleotide
ctattcacaggtgtgatcac

SEQ ID NO: 7709 - DNA, 20 bp, Artificial Sequence
  Description of Artificial Sequence: Synthetic oligonucleotide
tattcacaggtgtgatcacg

SEQ ID NO: 7710 - DNA, 20 bp, Artificial Sequence
  Description of Artificial Sequence: Synthetic oligonucleotide
attcacaggtgtgatcacgg

SEQ ID NO: 7711 - DNA, 20 bp, Artificial Sequence
  Description of Artificial Sequence: Synthetic oligonucleotide
ttcacaggtgtgatcacggc

SEQ ID NO: 7712 - DNA, 20 bp, Artificial Sequence
  Description of Artificial Sequence: Synthetic oligonucleotide
tcacaggtgtgatcacggct

SEQ ID NO: 7713 - DNA, 20 bp, Artificial Sequence
  Description of Artificial Sequence: Synthetic oligonucleotide
cacaggtgtgatcacggctc

SEQ ID NO: 7714 - DNA, 20 bp, Artificial Sequence
  Description of Artificial Sequence: Synthetic oligonucleotide
acaggtgtgatcacggctca

SEQ ID NO: 7715 - DNA, 20 bp, Artificial Sequence
  Description of Artificial Sequence: Synthetic oligonucleotide
caggtgtgatcacggctcac

SEQ ID NO: 7716 - DNA, 20 bp, Artificial Sequence
  Description of Artificial Sequence: Synthetic oligonucleotide
aggtgtgatcacggctcacg

SEQ ID NO: 7717 - DNA, 20 bp, Artificial Sequence
  Description of Artificial Sequence: Synthetic oligonucleotide
ggtgtgatcacggctcacgg

SEQ ID NO: 7718 - DNA, 20 bp, Artificial Sequence
  Description of Artificial Sequence: Synthetic oligonucleotide
gtgtgatcacggctcacggc

SEQ ID NO: 7719 - DNA, 20 bp, Artificial Sequence
  Description of Artificial Sequence: Synthetic oligonucleotide
tgtgatcacggctcacggca

SEQ ID NO: 7720 - DNA, 20 bp, Artificial Sequence
  Description of Artificial Sequence: Synthetic oligonucleotide
gtgatcacggctcacggcag

SEQ ID NO: 7721 - DNA, 20 bp, Artificial Sequence
  Description of Artificial Sequence: Synthetic oligonucleotide
tgatcacggctcacggcagc

SEQ ID NO: 7722 - DNA, 20 bp, Artificial Sequence
  Description of Artificial Sequence: Synthetic oligonucleotide
gatcacggctcacggcagcc

SEQ ID NO: 7723 - DNA, 20 bp, Artificial Sequence
  Description of Artificial Sequence: Synthetic oligonucleotide
atcacggctcacggcagcct

SEQ ID NO: 7724 - DNA, 20 bp, Artificial Sequence
  Description of Artificial Sequence: Synthetic oligonucleotide
tcacggctcacggcagcctt

SEQ ID NO: 7725 - DNA, 20 bp, Artificial Sequence
  Description of Artificial Sequence: Synthetic oligonucleotide
cacggctcacggcagccttt

SEQ ID NO: 7726 - DNA, 20 bp, Artificial Sequence
  Description of Artificial Sequence: Synthetic oligonucleotide
acggctcacggcagccttta

SEQ ID NO: 7727 - DNA, 20 bp, Artificial Sequence
  Description of Artificial Sequence: Synthetic oligonucleotide
cggctcacggcagcctttaa

SEQ ID NO: 7728 - DNA, 20 bp, Artificial Sequence
  Description of Artificial Sequence: Synthetic oligonucleotide
ggctcacggcagcctttaac

SEQ ID NO: 7729 - DNA, 20 bp, Artificial Sequence
  Description of Artificial Sequence: Synthetic oligonucleotide
gctcacggcagcctttaact

SEQ ID NO: 7730 - DNA, 20 bp, Artificial Sequence
  Description of Artificial Sequence: Synthetic oligonucleotide
ctcacggcagcctttaactc

SEQ ID NO: 7731 - DNA, 20 bp, Artificial Sequence
  Description of Artificial Sequence: Synthetic oligonucleotide
tcacggcagcctttaactcc

SEQ ID NO: 7732 - DNA, 20 bp, Artificial Sequence
  Description of Artificial Sequence: Synthetic oligonucleotide
cacggcagcctttaactcct

SEQ ID NO: 7733 - DNA, 20 bp, Artificial Sequence
  Description of Artificial Sequence: Synthetic oligonucleotide
acggcagcctttaactcctg

SEQ ID NO: 7734 - DNA, 20 bp, Artificial Sequence
  Description of Artificial Sequence: Synthetic oligonucleotide
cggcagcctttaactcctgg

SEQ ID NO: 7735 - DNA, 20 bp, Artificial Sequence
  Description of Artificial Sequence: Synthetic oligonucleotide
ggcagcctttaactcctggg

SEQ ID NO: 7736 - DNA, 20 bp, Artificial Sequence
  Description of Artificial Sequence: Synthetic oligonucleotide
gcagcctttaactcctgggc

SEQ ID NO: 7737 - DNA, 20 bp, Artificial Sequence
  Description of Artificial Sequence: Synthetic oligonucleotide
cagcctttaactcctgggct

SEQ ID NO: 7738 - DNA, 20 bp, Artificial Sequence
  Description of Artificial Sequence: Synthetic oligonucleotide
agcctttaactcctgggctg

SEQ ID NO: 7739 - DNA, 20 bp, Artificial Sequence
  Description of Artificial Sequence: Synthetic oligonucleotide
gcctttaactcctgggctga

SEQ ID NO: 7740 - DNA, 20 bp, Artificial Sequence
  Description of Artificial Sequence: Synthetic oligonucleotide
cctttaactcctgggctgaa

SEQ ID NO: 7741 - DNA, 20 bp, Artificial Sequence
  Description of Artificial Sequence: Synthetic oligonucleotide
ctttaactcctgggctgaag

SEQ ID NO: 7742 - DNA, 20 bp, Artificial Sequence
  Description of Artificial Sequence: Synthetic oligonucleotide
tttaactcctgggctgaagt

SEQ ID NO: 7743 - DNA, 20 bp, Artificial Sequence
  Description of Artificial Sequence: Synthetic oligonucleotide
ttaactcctgggctgaagtg

SEQ ID NO: 7744 - DNA, 20 bp, Artificial Sequence
  Description of Artificial Sequence: Synthetic oligonucleotide
taactcctgggctgaagtga

SEQ ID NO: 7745 - DNA, 20 bp, Artificial Sequence
  Description of Artificial Sequence: Synthetic oligonucleotide
aactcctgggctgaagtgac

SEQ ID NO: 7746 - DNA, 20 bp, Artificial Sequence
  Description of Artificial Sequence: Synthetic oligonucleotide
actcctgggctgaagtgacc

SEQ ID NO: 7747 - DNA, 20 bp, Artificial Sequence
  Description of Artificial Sequence: Synthetic oligonucleotide
ctcctgggctgaagtgaccc

SEQ ID NO: 7748 - DNA, 20 bp, Artificial Sequence
  Description of Artificial Sequence: Synthetic oligonucleotide
tcctgggctgaagtgaccct

SEQ ID NO: 7749 - DNA, 20 bp, Artificial Sequence
  Description of Artificial Sequence: Synthetic oligonucleotide
cctgggctgaagtgaccctc

SEQ ID NO: 7750 - DNA, 20 bp, Artificial Sequence
  Description of Artificial Sequence: Synthetic oligonucleotide
ctgggctgaagtgaccctcc

SEQ ID NO: 7751 - DNA, 20 bp, Artificial Sequence
  Description of Artificial Sequence: Synthetic oligonucleotide
tgggctgaagtgaccctcct

SEQ ID NO: 7752 - DNA, 20 bp, Artificial Sequence
  Description of Artificial Sequence: Synthetic oligonucleotide
gggctgaagtgaccctcctg

SEQ ID NO: 7753 - DNA, 20 bp, Artificial Sequence
  Description of Artificial Sequence: Synthetic oligonucleotide
ggctgaagtgaccctcctgc

SEQ ID NO: 7754 - DNA, 20 bp, Artificial Sequence
  Description of Artificial Sequence: Synthetic oligonucleotide
gctgaagtgaccctcctgcc

SEQ ID NO: 7755 - DNA, 20 bp, Artificial Sequence
  Description of Artificial Sequence: Synthetic oligonucleotide
ctgaagtgaccctcctgcct

SEQ ID NO: 7756 - DNA, 20 bp, Artificial Sequence
  Description of Artificial Sequence: Synthetic oligonucleotide
tgaagtgaccctcctgcctt

SEQ ID NO: 7757 - DNA, 20 bp, Artificial Sequence
  Description of Artificial Sequence: Synthetic oligonucleotide
gaagtgaccctcctgccttg

SEQ ID NO: 7758 - DNA, 20 bp, Artificial Sequence
  Description of Artificial Sequence: Synthetic oligonucleotide
aagtgaccctcctgccttgg

SEQ ID NO: 7759 - DNA, 20 bp, Artificial Sequence
  Description of Artificial Sequence: Synthetic oligonucleotide
agtgaccctcctgccttggc

SEQ ID NO: 7760 - DNA, 20 bp, Artificial Sequence
  Description of Artificial Sequence: Synthetic oligonucleotide
gtgaccctcctgccttggcc

SEQ ID NO: 7761 - DNA, 20 bp, Artificial Sequence
  Description of Artificial Sequence: Synthetic oligonucleotide
tgaccctcctgccttggcct

SEQ ID NO: 7762 - DNA, 20 bp, Artificial Sequence
  Description of Artificial Sequence: Synthetic oligonucleotide
gaccctcctgccttggcctc

SEQ ID NO: 7763 - DNA, 20 bp, Artificial Sequence
  Description of Artificial Sequence: Synthetic oligonucleotide
accctcctgccttggcctcc

SEQ ID NO: 7764 - DNA, 20 bp, Artificial Sequence
  Description of Artificial Sequence: Synthetic oligonucleotide
ccctcctgccttggcctccc

SEQ ID NO: 7765 - DNA, 20 bp, Artificial Sequence
  Description of Artificial Sequence: Synthetic oligonucleotide
cctcctgccttggcctcccg

SEQ ID NO: 7766 - DNA, 20 bp, Artificial Sequence
  Description of Artificial Sequence: Synthetic oligonucleotide
ctcctgccttggcctcccga

SEQ ID NO: 7767 - DNA, 20 bp, Artificial Sequence
  Description of Artificial Sequence: Synthetic oligonucleotide
tcctgccttggcctcccgag

SEQ ID NO: 7768 - DNA, 20 bp, Artificial Sequence
  Description of Artificial Sequence: Synthetic oligonucleotide
cctgccttggcctcccgagt

SEQ ID NO: 7769 - DNA, 20 bp, Artificial Sequence
  Description of Artificial Sequence: Synthetic oligonucleotide
ctgccttggcctcccgagta

SEQ ID NO: 7770 - DNA, 20 bp, Artificial Sequence
  Description of Artificial Sequence: Synthetic oligonucleotide
tgccttggcctcccgagtag

SEQ ID NO: 7771 - DNA, 20 bp, Artificial Sequence
  Description of Artificial Sequence: Synthetic oligonucleotide
gccttggcctcccgagtagc

SEQ ID NO: 7772 - DNA, 20 bp, Artificial Sequence
  Description of Artificial Sequence: Synthetic oligonucleotide
ccttggcctcccgagtagct

SEQ ID NO: 7773 - DNA, 20 bp, Artificial Sequence
  Description of Artificial Sequence: Synthetic oligonucleotide
cttggcctcccgagtagctg

SEQ ID NO: 7774 - DNA, 20 bp, Artificial Sequence
  Description of Artificial Sequence: Synthetic oligonucleotide
ttggcctcccgagtagctgg

SEQ ID NO: 7775 - DNA, 20 bp, Artificial Sequence
  Description of Artificial Sequence: Synthetic oligonucleotide
tggcctcccgagtagctggg

SEQ ID NO: 7776 - DNA, 20 bp, Artificial Sequence
  Description of Artificial Sequence: Synthetic oligonucleotide
ggcctcccgagtagctggga

SEQ ID NO: 7777 - DNA, 20 bp, Artificial Sequence
  Description of Artificial Sequence: Synthetic oligonucleotide
gcctcccgagtagctgggac

SEQ ID NO: 7778 - DNA, 20 bp, Artificial Sequence
  Description of Artificial Sequence: Synthetic oligonucleotide
cctcccgagtagctgggact

SEQ ID NO: 7779 - DNA, 20 bp, Artificial Sequence
  Description of Artificial Sequence: Synthetic oligonucleotide
ctcccgagtagctgggacta

SEQ ID NO: 7780 - DNA, 20 bp, Artificial Sequence
  Description of Artificial Sequence: Synthetic oligonucleotide
tcccgagtagctgggactac

SEQ ID NO: 7781 - DNA, 20 bp, Artificial Sequence
  Description of Artificial Sequence: Synthetic oligonucleotide
cccgagtagctgggactaca

SEQ ID NO: 7782 - DNA, 20 bp, Artificial Sequence
  Description of Artificial Sequence: Synthetic oligonucleotide
ccgagtagctgggactacag

SEQ ID NO: 7783 - DNA, 20 bp, Artificial Sequence
  Description of Artificial Sequence: Synthetic oligonucleotide
cgagtagctgggactacagg

SEQ ID NO: 7784 - DNA, 20 bp, Artificial Sequence
  Description of Artificial Sequence: Synthetic oligonucleotide
gagtagctgggactacaggc

SEQ ID NO: 7785 - DNA, 20 bp, Artificial Sequence
  Description of Artificial Sequence: Synthetic oligonucleotide
agtagctgggactacaggca

SEQ ID NO: 7786 - DNA, 20 bp, Artificial Sequence
  Description of Artificial Sequence: Synthetic oligonucleotide
gtagctgggactacaggcat

SEQ ID NO: 7787 - DNA, 20 bp, Artificial Sequence
  Description of Artificial Sequence: Synthetic oligonucleotide
tagctgggactacaggcatg

SEQ ID NO: 7788 - DNA, 20 bp, Artificial Sequence
  Description of Artificial Sequence: Synthetic oligonucleotide
agctgggactacaggcatgt

SEQ ID NO: 7789 - DNA, 20 bp, Artificial Sequence
  Description of Artificial Sequence: Synthetic oligonucleotide
gctgggactacaggcatgtg

SEQ ID NO: 7790 - DNA, 20 bp, Artificial Sequence
  Description of Artificial Sequence: Synthetic oligonucleotide
ctgggactacaggcatgtgc

SEQ ID NO: 7791 - DNA, 20 bp, Artificial Sequence
  Description of Artificial Sequence: Synthetic oligonucleotide
tgggactacaggcatgtgcc

SEQ ID NO: 7792 - DNA, 20 bp, Artificial Sequence
  Description of Artificial Sequence: Synthetic oligonucleotide
gggactacaggcatgtgcca

SEQ ID NO: 7793 - DNA, 20 bp, Artificial Sequence
  Description of Artificial Sequence: Synthetic oligonucleotide
ggactacaggcatgtgccac

SEQ ID NO: 7794 - DNA, 20 bp, Artificial Sequence
  Description of Artificial Sequence: Synthetic oligonucleotide
gactacaggcatgtgccacc

SEQ ID NO: 7795 - DNA, 20 bp, Artificial Sequence
  Description of Artificial Sequence: Synthetic oligonucleotide
actacaggcatgtgccacca

SEQ ID NO: 7796 - DNA, 20 bp, Artificial Sequence
  Description of Artificial Sequence: Synthetic oligonucleotide
ctacaggcatgtgccaccat

SEQ ID NO: 7797 - DNA, 20 bp, Artificial Sequence
  Description of Artificial Sequence: Synthetic oligonucleotide
tacaggcatgtgccaccatg

SEQ ID NO: 7798 - DNA, 20 bp, Artificial Sequence
  Description of Artificial Sequence: Synthetic oligonucleotide
acaggcatgtgccaccatgc

SEQ ID NO: 7799 - DNA, 20 bp, Artificial Sequence
  Description of Artificial Sequence: Synthetic oligonucleotide
caggcatgtgccaccatgcc

SEQ ID NO: 7800 - DNA, 20 bp, Artificial Sequence
  Description of Artificial Sequence: Synthetic oligonucleotide
aggcatgtgccaccatgccc

SEQ ID NO: 7801 - DNA, 20 bp, Artificial Sequence
  Description of Artificial Sequence: Synthetic oligonucleotide
ggcatgtgccaccatgccca

SEQ ID NO: 7802 - DNA, 20 bp, Artificial Sequence
  Description of Artificial Sequence: Synthetic oligonucleotide
gcatgtgccaccatgcccag

SEQ ID NO: 7803 - DNA, 20 bp, Artificial Sequence
  Description of Artificial Sequence: Synthetic oligonucleotide
catgtgccaccatgcccagc

SEQ ID NO: 7804 - DNA, 20 bp, Artificial Sequence
  Description of Artificial Sequence: Synthetic oligonucleotide
atgtgccaccatgcccagca

SEQ ID NO: 7805 - DNA, 20 bp, Artificial Sequence
  Description of Artificial Sequence: Synthetic oligonucleotide
tgtgccaccatgcccagcaa

SEQ ID NO: 7806 - DNA, 20 bp, Artificial Sequence
  Description of Artificial Sequence: Synthetic oligonucleotide
gtgccaccatgcccagcaag

SEQ ID NO: 7807 - DNA, 20 bp, Artificial Sequence
  Description of Artificial Sequence: Synthetic oligonucleotide
tgccaccatgcccagcaagg

SEQ ID NO: 7808 - DNA, 20 bp, Artificial Sequence
  Description of Artificial Sequence: Synthetic oligonucleotide
gccaccatgcccagcaaggg

SEQ ID NO: 7809 - DNA, 20 bp, Artificial Sequence
  Description of Artificial Sequence: Synthetic oligonucleotide
ccaccatgcccagcaagggc

SEQ ID NO: 7810 - DNA, 20 bp, Artificial Sequence
  Description of Artificial Sequence: Synthetic oligonucleotide
caccatgcccagcaagggct

SEQ ID NO: 7811 - DNA, 20 bp, Artificial Sequence
  Description of Artificial Sequence: Synthetic oligonucleotide
accatgcccagcaagggctg

SEQ ID NO: 7812 - DNA, 20 bp, Artificial Sequence
  Description of Artificial Sequence: Synthetic oligonucleotide
ccatgcccagcaagggctga

SEQ ID NO: 7813 - DNA, 20 bp, Artificial Sequence
  Description of Artificial Sequence: Synthetic oligonucleotide
catgcccagcaagggctgaa

SEQ ID NO: 7814 - DNA, 20 bp, Artificial Sequence
  Description of Artificial Sequence: Synthetic oligonucleotide
atgcccagcaagggctgaat

SEQ ID NO: 7815 - DNA, 20 bp, Artificial Sequence
  Description of Artificial Sequence: Synthetic oligonucleotide
tgcccagcaagggctgaatt

SEQ ID NO: 7816 - DNA, 20 bp, Artificial Sequence
  Description of Artificial Sequence: Synthetic oligonucleotide
gcccagcaagggctgaattt

SEQ ID NO: 7817 - DNA, 20 bp, Artificial Sequence
  Description of Artificial Sequence: Synthetic oligonucleotide
cccagcaagggctgaatttt

SEQ ID NO: 7818 - DNA, 20 bp, Artificial Sequence
  Description of Artificial Sequence: Synthetic oligonucleotide
ccagcaagggctgaatttta

SEQ ID NO: 7819 - DNA, 20 bp, Artificial Sequence
  Description of Artificial Sequence: Synthetic oligonucleotide
cagcaagggctgaattttat

SEQ ID NO: 7820 - DNA, 20 bp, Artificial Sequence
  Description of Artificial Sequence: Synthetic oligonucleotide
agcaagggctgaattttatt

SEQ ID NO: 7821 - DNA, 20 bp, Artificial Sequence
  Description of Artificial Sequence: Synthetic oligonucleotide
gcaagggctgaattttattt

SEQ ID NO: 7822 - DNA, 20 bp, Artificial Sequence
  Description of Artificial Sequence: Synthetic oligonucleotide
caagggctgaattttatttt

SEQ ID NO: 7823 - DNA, 20 bp, Artificial Sequence
  Description of Artificial Sequence: Synthetic oligonucleotide
aagggctgaattttatttta

SEQ ID NO: 7824 - DNA, 20 bp, Artificial Sequence
  Description of Artificial Sequence: Synthetic oligonucleotide
agggctgaattttattttat

SEQ ID NO: 7825 - DNA, 20 bp, Artificial Sequence
  Description of Artificial Sequence: Synthetic oligonucleotide
gggctgaattttattttatt

SEQ ID NO: 7826 - DNA, 20 bp, Artificial Sequence
  Description of Artificial Sequence: Synthetic oligonucleotide
ggctgaattttattttattt

SEQ ID NO: 7827 - DNA, 20 bp, Artificial Sequence
  Description of Artificial Sequence: Synthetic oligonucleotide
gctgaattttattttatttt

SEQ ID NO: 7828 - DNA, 20 bp, Artificial Sequence
  Description of Artificial Sequence: Synthetic oligonucleotide
ctgaattttattttatttta

SEQ ID NO: 7829 - DNA, 20 bp, Artificial Sequence
  Description of Artificial Sequence: Synthetic oligonucleotide
tgaattttattttattttat

SEQ ID NO: 7830 - DNA, 20 bp, Artificial Sequence
  Description of Artificial Sequence: Synthetic oligonucleotide
gaattttattttattttatt

SEQ ID NO: 7831 - DNA, 20 bp, Artificial Sequence
  Description of Artificial Sequence: Synthetic oligonucleotide
aattttattttattttattt

SEQ ID NO: 7832 - DNA, 20 bp, Artificial Sequence
  Description of Artificial Sequence: Synthetic oligonucleotide
attttattttattttatttt

SEQ ID NO: 7833 - DNA, 20 bp, Artificial Sequence
  Description of Artificial Sequence: Synthetic oligonucleotide
ttttattttattttatttta

SEQ ID NO: 7834 - DNA, 20 bp, Artificial Sequence
  Description of Artificial Sequence: Synthetic oligonucleotide
tttattttattttattttat

SEQ ID NO: 7835 - DNA, 20 bp, Artificial Sequence
  Description of Artificial Sequence: Synthetic oligonucleotide
ttattttattttattttatt

SEQ ID NO: 7836 - DNA, 20 bp, Artificial Sequence
  Description of Artificial Sequence: Synthetic oligonucleotide
tattttattttattttattt

SEQ ID NO: 7837 - DNA, 20 bp, Artificial Sequence
  Description of Artificial Sequence: Synthetic oligonucleotide
attttattttattttatttt

SEQ ID NO: 7838 - DNA, 20 bp, Artificial Sequence
  Description of Artificial Sequence: Synthetic oligonucleotide
ttttattttattttattttc

SEQ ID NO: 7839 - DNA, 20 bp, Artificial Sequence
  Description of Artificial Sequence: Synthetic oligonucleotide
tttattttattttattttct

SEQ ID NO: 7840 - DNA, 20 bp, Artificial Sequence
  Description of Artificial Sequence: Synthetic oligonucleotide
ttattttattttattttctc

SEQ ID NO: 7841 - DNA, 20 bp, Artificial Sequence
  Description of Artificial Sequence: Synthetic oligonucleotide
tattttattttattttctct

SEQ ID NO: 7842 - DNA, 20 bp, Artificial Sequence
  Description of Artificial Sequence: Synthetic oligonucleotide
attttattttattttctctt

SEQ ID NO: 7843 - DNA, 20 bp, Artificial Sequence
  Description of Artificial Sequence: Synthetic oligonucleotide
ttttattttattttctcttt

SEQ ID NO: 7844 - DNA, 20 bp, Artificial Sequence
  Description of Artificial Sequence: Synthetic oligonucleotide
tttattttattttctctttt

SEQ ID NO: 7845 - DNA, 20 bp, Artificial Sequence
  Description of Artificial Sequence: Synthetic oligonucleotide
ttattttattttctcttttt

SEQ ID NO: 7846 - DNA, 20 bp, Artificial Sequence
  Description of Artificial Sequence: Synthetic oligonucleotide
tattttattttctctttttt

SEQ ID NO: 7847 - DNA, 20 bp, Artificial Sequence
  Description of Artificial Sequence: Synthetic oligonucleotide
attttattttctctttttta

SEQ ID NO: 7848 - DNA, 20 bp, Artificial Sequence
  Description of Artificial Sequence: Synthetic oligonucleotide
ttttattttctcttttttat

SEQ ID NO: 7849 - DNA, 20 bp, Artificial Sequence
  Description of Artificial Sequence: Synthetic oligonucleotide
tttattttctcttttttatt

SEQ ID NO: 7850 - DNA, 20 bp, Artificial Sequence
  Description of Artificial Sequence: Synthetic oligonucleotide
ttattttctcttttttattt

SEQ ID NO: 7851 - DNA, 20 bp, Artificial Sequence
  Description of Artificial Sequence: Synthetic oligonucleotide
tattttctcttttttatttt

SEQ ID NO: 7852 - DNA, 20 bp, Artificial Sequence
  Description of Artificial Sequence: Synthetic oligonucleotide
attttctcttttttattttt

SEQ ID NO: 7853 - DNA, 20 bp, Artificial Sequence
  Description of Artificial Sequence: Synthetic oligonucleotide
ttttctcttttttatttttt

SEQ ID NO: 7854 - DNA, 20 bp, Artificial Sequence
  Description of Artificial Sequence: Synthetic oligonucleotide
tttctcttttttattttttt

SEQ ID NO: 7855 - DNA, 20 bp, Artificial Sequence
  Description of Artificial Sequence: Synthetic oligonucleotide
ttctcttttttatttttttg

SEQ ID NO: 7856 - DNA, 20 bp, Artificial Sequence
  Description of Artificial Sequence: Synthetic oligonucleotide
tctcttttttatttttttga

SEQ ID NO: 7857 - DNA, 20 bp, Artificial Sequence
  Description of Artificial Sequence: Synthetic oligonucleotide
ctcttttttatttttttgat

SEQ ID NO: 7858 - DNA, 20 bp, Artificial Sequence
  Description of Artificial Sequence: Synthetic oligonucleotide
tcttttttatttttttgatg

SEQ ID NO: 7859 - DNA, 20 bp, Artificial Sequence
  Description of Artificial Sequence: Synthetic oligonucleotide
cttttttatttttttgatgg

SEQ ID NO: 7860 - DNA, 20 bp, Artificial Sequence
  Description of Artificial Sequence: Synthetic oligonucleotide
ttttttatttttttgatggg

SEQ ID NO: 7861 - DNA, 20 bp, Artificial Sequence
  Description of Artificial Sequence: Synthetic oligonucleotide
tttttatttttttgatgggg

SEQ ID NO: 7862 - DNA, 20 bp, Artificial Sequence
  Description of Artificial Sequence: Synthetic oligonucleotide
ttttatttttttgatggggg

SEQ ID NO: 7863 - DNA, 20 bp, Artificial Sequence
  Description of Artificial Sequence: Synthetic oligonucleotide
tttatttttttgatgggggg

SEQ ID NO: 7864 - DNA, 20 bp, Artificial Sequence
  Description of Artificial Sequence: Synthetic oligonucleotide
ttatttttttgatgggggga

SEQ ID NO: 7865 - DNA, 20 bp, Artificial Sequence
  Description of Artificial Sequence: Synthetic oligonucleotide
tatttttttgatggggggac

SEQ ID NO: 7866 - DNA, 20 bp, Artificial Sequence
  Description of Artificial Sequence: Synthetic oligonucleotide
atttttttgatggggggacg

SEQ ID NO: 7867 - DNA, 20 bp, Artificial Sequence
  Description of Artificial Sequence: Synthetic oligonucleotide
tttttttgatggggggacgg

SEQ ID NO: 7868 - DNA, 20 bp, Artificial Sequence
  Description of Artificial Sequence: Synthetic oligonucleotide
ttttttgatggggggacgga

SEQ ID NO: 7869 - DNA, 20 bp, Artificial Sequence
  Description of Artificial Sequence: Synthetic oligonucleotide
tttttgatggggggacggag

SEQ ID NO: 7870 - DNA, 20 bp, Artificial Sequence
  Description of Artificial Sequence: Synthetic oligonucleotide
ttttgatggggggacggagt

SEQ ID NO: 7871 - DNA, 20 bp, Artificial Sequence
  Description of Artificial Sequence: Synthetic oligonucleotide
tttgatggggggacggagtc

SEQ ID NO: 7872 - DNA, 20 bp, Artificial Sequence
  Description of Artificial Sequence: Synthetic oligonucleotide
ttgatggggggacggagtct

SEQ ID NO: 7873 - DNA, 20 bp, Artificial Sequence
  Description of Artificial Sequence: Synthetic oligonucleotide
tgatggggggacggagtctc

SEQ ID NO: 7874 - DNA, 20 bp, Artificial Sequence
  Description of Artificial Sequence: Synthetic oligonucleotide
gatggggggacggagtctcg

SEQ ID NO: 7875 - DNA, 20 bp, Artificial Sequence
  Description of Artificial Sequence: Synthetic oligonucleotide
atggggggacggagtctcgc

SEQ ID NO: 7876 - DNA, 20 bp, Artificial Sequence
  Description of Artificial Sequence: Synthetic oligonucleotide
tggggggacggagtctcgct

SEQ ID NO: 7877 - DNA, 20 bp, Artificial Sequence
  Description of Artificial Sequence: Synthetic oligonucleotide
ggggggacggagtctcgctc

SEQ ID NO: 7878 - DNA, 20 bp, Artificial Sequence
  Description of Artificial Sequence: Synthetic oligonucleotide
gggggacggagtctcgctct

SEQ ID NO: 7879 - DNA, 20 bp, Artificial Sequence
  Description of Artificial Sequence: Synthetic oligonucleotide
ggggacggagtctcgctctg

SEQ ID NO: 7880 - DNA, 20 bp, Artificial Sequence
  Description of Artificial Sequence: Synthetic oligonucleotide
gggacggagtctcgctctgt

SEQ ID NO: 7881 - DNA, 20 bp, Artificial Sequence
  Description of Artificial Sequence: Synthetic oligonucleotide
ggacggagtctcgctctgtc

SEQ ID NO: 7882 - DNA, 20 bp, Artificial Sequence
  Description of Artificial Sequence: Synthetic oligonucleotide
gacggagtctcgctctgtcg

SEQ ID NO: 7883 - DNA, 20 bp, Artificial Sequence
  Description of Artificial Sequence: Synthetic oligonucleotide
acggagtctcgctctgtcgc

SEQ ID NO: 7884 - DNA, 20 bp, Artificial Sequence
  Description of Artificial Sequence: Synthetic oligonucleotide
cggagtctcgctctgtcgcc

SEQ ID NO: 7885 - DNA, 20 bp, Artificial Sequence
  Description of Artificial Sequence: Synthetic oligonucleotide
ggagtctcgctctgtcgccc

SEQ ID NO: 7886 - DNA, 20 bp, Artificial Sequence
  Description of Artificial Sequence: Synthetic oligonucleotide
gagtctcgctctgtcgccca

SEQ ID NO: 7887 - DNA, 20 bp, Artificial Sequence
  Description of Artificial Sequence: Synthetic oligonucleotide
agtctcgctctgtcgcccag

SEQ ID NO: 7888 - DNA, 20 bp, Artificial Sequence
  Description of Artificial Sequence: Synthetic oligonucleotide
gtctcgctctgtcgcccagg

SEQ ID NO: 7889 - DNA, 20 bp, Artificial Sequence
  Description of Artificial Sequence: Synthetic oligonucleotide
tctcgctctgtcgcccaggc

SEQ ID NO: 7890 - DNA, 20 bp, Artificial Sequence
  Description of Artificial Sequence: Synthetic oligonucleotide
ctcgctctgtcgcccaggct

SEQ ID NO: 7891 - DNA, 20 bp, Artificial Sequence
  Description of Artificial Sequence: Synthetic oligonucleotide
tcgctctgtcgcccaggctg

SEQ ID NO: 7892 - DNA, 20 bp, Artificial Sequence
  Description of Artificial Sequence: Synthetic oligonucleotide
cgctctgtcgcccaggctgg

SEQ ID NO: 7893 - DNA, 20 bp, Artificial Sequence
  Description of Artificial Sequence: Synthetic oligonucleotide
gctctgtcgcccaggctgga

SEQ ID NO: 7894 - DNA, 20 bp, Artificial Sequence
  Description of Artificial Sequence: Synthetic oligonucleotide
ctctgtcgcccaggctggag

SEQ ID NO: 7895 - DNA, 20 bp, Artificial Sequence
  Description of Artificial Sequence: Synthetic oligonucleotide
tctgtcgcccaggctggagt

SEQ ID NO: 7896 - DNA, 20 bp, Artificial Sequence
  Description of Artificial Sequence: Synthetic oligonucleotide
ctgtcgcccaggctggagtg

SEQ ID NO: 7897 - DNA, 20 bp, Artificial Sequence
  Description of Artificial Sequence: Synthetic oligonucleotide
tgtcgcccaggctggagtgc

SEQ ID NO: 7898 - DNA, 20 bp, Artificial Sequence
  Description of Artificial Sequence: Synthetic oligonucleotide
gtcgcccaggctggagtgcg

SEQ ID NO: 7899 - DNA, 20 bp, Artificial Sequence
  Description of Artificial Sequence: Synthetic oligonucleotide
tcgcccaggctggagtgcgg

SEQ ID NO: 7900 - DNA, 20 bp, Artificial Sequence
  Description of Artificial Sequence: Synthetic oligonucleotide
cgcccaggctggagtgcggt

SEQ ID NO: 7901 - DNA, 20 bp, Artificial Sequence
  Description of Artificial Sequence: Synthetic oligonucleotide
gcccaggctggagtgcggtg

SEQ ID NO: 7902 - DNA, 20 bp, Artificial Sequence
  Description of Artificial Sequence: Synthetic oligonucleotide
cccaggctggagtgcggtgg

SEQ ID NO: 7903 - DNA, 20 bp, Artificial Sequence
  Description of Artificial Sequence: Synthetic oligonucleotide
ccaggctggagtgcggtggc

SEQ ID NO: 7904 - DNA, 20 bp, Artificial Sequence
  Description of Artificial Sequence: Synthetic oligonucleotide
caggctggagtgcggtggcg

SEQ ID NO: 7905 - DNA, 20 bp, Artificial Sequence
  Description of Artificial Sequence: Synthetic oligonucleotide
aggctggagtgcggtggcgt

SEQ ID NO: 7906 - DNA, 20 bp, Artificial Sequence
  Description of Artificial Sequence: Synthetic oligonucleotide
ggctggagtgcggtggcgtc

SEQ ID NO: 7907 - DNA, 20 bp, Artificial Sequence
  Description of Artificial Sequence: Synthetic oligonucleotide
gctggagtgcggtggcgtca

SEQ ID NO: 7908 - DNA, 20 bp, Artificial Sequence
  Description of Artificial Sequence: Synthetic oligonucleotide
ctggagtgcggtggcgtcat

SEQ ID NO: 7909 - DNA, 20 bp, Artificial Sequence
  Description of Artificial Sequence: Synthetic oligonucleotide
tggagtgcggtggcgtcatc

SEQ ID NO: 7910 - DNA, 20 bp, Artificial Sequence
  Description of Artificial Sequence: Synthetic oligonucleotide
ggagtgcggtggcgtcatct

SEQ ID NO: 7911 - DNA, 20 bp, Artificial Sequence
  Description of Artificial Sequence: Synthetic oligonucleotide
gagtgcggtggcgtcatctc

SEQ ID NO: 7912 - DNA, 20 bp, Artificial Sequence
  Description of Artificial Sequence: Synthetic oligonucleotide
agtgcggtggcgtcatctca

SEQ ID NO: 7913 - DNA, 20 bp, Artificial Sequence
  Description of Artificial Sequence: Synthetic oligonucleotide
gtgcggtggcgtcatctcag

SEQ ID NO: 7914 - DNA, 20 bp, Artificial Sequence
  Description of Artificial Sequence: Synthetic oligonucleotide
tgcggtggcgtcatctcagc

SEQ ID NO: 7915 - DNA, 20 bp, Artificial Sequence
  Description of Artificial Sequence: Synthetic oligonucleotide
gcggtggcgtcatctcagct

SEQ ID NO: 7916 - DNA, 20 bp, Artificial Sequence
  Description of Artificial Sequence: Synthetic oligonucleotide
cggtggcgtcatctcagctc

SEQ ID NO: 7917 - DNA, 20 bp, Artificial Sequence
  Description of Artificial Sequence: Synthetic oligonucleotide
ggtggcgtcatctcagctca

SEQ ID NO: 7918 - DNA, 20 bp, Artificial Sequence
  Description of Artificial Sequence: Synthetic oligonucleotide
gtggcgtcatctcagctcac

SEQ ID NO: 7919 - DNA, 20 bp, Artificial Sequence
  Description of Artificial Sequence: Synthetic oligonucleotide
tggcgtcatctcagctcact

SEQ ID NO: 7920 - DNA, 20 bp, Artificial Sequence
  Description of Artificial Sequence: Synthetic oligonucleotide
ggcgtcatctcagctcactg

SEQ ID NO: 7921 - DNA, 20 bp, Artificial Sequence
  Description of Artificial Sequence: Synthetic oligonucleotide
gcgtcatctcagctcactgc

SEQ ID NO: 7922 - DNA, 20 bp, Artificial Sequence
  Description of Artificial Sequence: Synthetic oligonucleotide
cgtcatctcagctcactgca

SEQ ID NO: 7923 - DNA, 20 bp, Artificial Sequence
  Description of Artificial Sequence: Synthetic oligonucleotide
gtcatctcagctcactgcaa

SEQ ID NO: 7924 - DNA, 20 bp, Artificial Sequence
  Description of Artificial Sequence: Synthetic oligonucleotide
tcatctcagctcactgcaac

SEQ ID NO: 7925 - DNA, 20 bp, Artificial Sequence
  Description of Artificial Sequence: Synthetic oligonucleotide
catctcagctcactgcaacc

SEQ ID NO: 7926 - DNA, 20 bp, Artificial Sequence
  Description of Artificial Sequence: Synthetic oligonucleotide
atctcagctcactgcaacct

SEQ ID NO: 7927 - DNA, 20 bp, Artificial Sequence
  Description of Artificial Sequence: Synthetic oligonucleotide
tctcagctcactgcaacctc

SEQ ID NO: 7928 - DNA, 20 bp, Artificial Sequence
  Description of Artificial Sequence: Synthetic oligonucleotide
ctcagctcactgcaacctct

SEQ ID NO: 7929 - DNA, 20 bp, Artificial Sequence
  Description of Artificial Sequence: Synthetic oligonucleotide
tcagctcactgcaacctctg

SEQ ID NO: 7930 - DNA, 20 bp, Artificial Sequence
  Description of Artificial Sequence: Synthetic oligonucleotide
cagctcactgcaacctctgc

SEQ ID NO: 7931 - DNA, 20 bp, Artificial Sequence
  Description of Artificial Sequence: Synthetic oligonucleotide
agctcactgcaacctctgcc

SEQ ID NO: 7932 - DNA, 20 bp, Artificial Sequence
  Description of Artificial Sequence: Synthetic oligonucleotide
gctcactgcaacctctgcct

SEQ ID NO: 7933 - DNA, 20 bp, Artificial Sequence
  Description of Artificial Sequence: Synthetic oligonucleotide
ctcactgcaacctctgcctc

SEQ ID NO: 7934 - DNA, 20 bp, Artificial Sequence
  Description of Artificial Sequence: Synthetic oligonucleotide
tcactgcaacctctgcctcc

SEQ ID NO: 7935 - DNA, 20 bp, Artificial Sequence
  Description of Artificial Sequence: Synthetic oligonucleotide
cactgcaacctctgcctccc

SEQ ID NO: 7936 - DNA, 20 bp, Artificial Sequence
  Description of Artificial Sequence: Synthetic oligonucleotide
actgcaacctctgcctccca

SEQ ID NO: 7937 - DNA, 20 bp, Artificial Sequence
  Description of Artificial Sequence: Synthetic oligonucleotide
ctgcaacctctgcctcccag

SEQ ID NO: 7938 - DNA, 20 bp, Artificial Sequence
  Description of Artificial Sequence: Synthetic oligonucleotide
tgcaacctctgcctcccagg

SEQ ID NO: 7939 - DNA, 20 bp, Artificial Sequence
  Description of Artificial Sequence: Synthetic oligonucleotide
gcaacctctgcctcccaggt

SEQ ID NO: 7940 - DNA, 20 bp, Artificial Sequence
  Description of Artificial Sequence: Synthetic oligonucleotide
caacctctgcctcccaggtt

SEQ ID NO: 7941 - DNA, 20 bp, Artificial Sequence
  Description of Artificial Sequence: Synthetic oligonucleotide
aacctctgcctcccaggttc

SEQ ID NO: 7942 - DNA, 20 bp, Artificial Sequence
  Description of Artificial Sequence: Synthetic oligonucleotide
acctctgcctcccaggttca

SEQ ID NO: 7943 - DNA, 20 bp, Artificial Sequence
  Description of Artificial Sequence: Synthetic oligonucleotide
cctctgcctcccaggttcaa

SEQ ID NO: 7944 - DNA, 20 bp, Artificial Sequence
  Description of Artificial Sequence: Synthetic oligonucleotide
ctctgcctcccaggttcaag

SEQ ID NO: 7945 - DNA, 20 bp, Artificial Sequence
  Description of Artificial Sequence: Synthetic oligonucleotide
tctgcctcccaggttcaaga

SEQ ID NO: 7946 - DNA, 20 bp, Artificial Sequence
  Description of Artificial Sequence: Synthetic oligonucleotide
ctgcctcccaggttcaagag

SEQ ID NO: 7947 - DNA, 20 bp, Artificial Sequence
  Description of Artificial Sequence: Synthetic oligonucleotide
tgcctcccaggttcaagaga

SEQ ID NO: 7948 - DNA, 20 bp, Artificial Sequence
  Description of Artificial Sequence: Synthetic oligonucleotide
gcctcccaggttcaagagat

SEQ ID NO: 7949 - DNA, 20 bp, Artificial Sequence
  Description of Artificial Sequence: Synthetic oligonucleotide
cctcccaggttcaagagatt

SEQ ID NO: 7950 - DNA, 20 bp, Artificial Sequence
  Description of Artificial Sequence: Synthetic oligonucleotide
ctcccaggttcaagagattc

SEQ ID NO: 7951 - DNA, 20 bp, Artificial Sequence
  Description of Artificial Sequence: Synthetic oligonucleotide
tcccaggttcaagagattct

SEQ ID NO: 7952 - DNA, 20 bp, Artificial Sequence
  Description of Artificial Sequence: Synthetic oligonucleotide
cccaggttcaagagattctc

SEQ ID NO: 7953 - DNA, 20 bp, Artificial Sequence
  Description of Artificial Sequence: Synthetic oligonucleotide
ccaggttcaagagattctcc

SEQ ID NO: 7954 - DNA, 20 bp, Artificial Sequence
  Description of Artificial Sequence: Synthetic oligonucleotide
caggttcaagagattctcct

SEQ ID NO: 7955 - DNA, 20 bp, Artificial Sequence
  Description of Artificial Sequence: Synthetic oligonucleotide
aggttcaagagattctcctg

SEQ ID NO: 7956 - DNA, 20 bp, Artificial Sequence
  Description of Artificial Sequence: Synthetic oligonucleotide
ggttcaagagattctcctgc

SEQ ID NO: 7957 - DNA, 20 bp, Artificial Sequence
  Description of Artificial Sequence: Synthetic oligonucleotide
gttcaagagattctcctgcc

SEQ ID NO: 7958 - DNA, 20 bp, Artificial Sequence
  Description of Artificial Sequence: Synthetic oligonucleotide
ttcaagagattctcctgcct

SEQ ID NO: 7959 - DNA, 20 bp, Artificial Sequence
  Description of Artificial Sequence: Synthetic oligonucleotide
tcaagagattctcctgcctc

SEQ ID NO: 7960 - DNA, 20 bp, Artificial Sequence
  Description of Artificial Sequence: Synthetic oligonucleotide
caagagattctcctgcctca

SEQ ID NO: 7961 - DNA, 20 bp, Artificial Sequence
  Description of Artificial Sequence: Synthetic oligonucleotide
aagagattctcctgcctcag

SEQ ID NO: 7962 - DNA, 20 bp, Artificial Sequence
  Description of Artificial Sequence: Synthetic oligonucleotide
agagattctcctgcctcagc

SEQ ID NO: 7963 - DNA, 20 bp, Artificial Sequence
  Description of Artificial Sequence: Synthetic oligonucleotide
gagattctcctgcctcagcc

SEQ ID NO: 7964 - DNA, 20 bp, Artificial Sequence
  Description of Artificial Sequence: Synthetic oligonucleotide
agattctcctgcctcagcca

SEQ ID NO: 7965 - DNA, 20 bp, Artificial Sequence
  Description of Artificial Sequence: Synthetic oligonucleotide
gattctcctgcctcagccac

SEQ ID NO: 7966 - DNA, 20 bp, Artificial Sequence
  Description of Artificial Sequence: Synthetic oligonucleotide
attctcctgcctcagccacc

SEQ ID NO: 7967 - DNA, 20 bp, Artificial Sequence
  Description of Artificial Sequence: Synthetic oligonucleotide
ttctcctgcctcagccacct

SEQ ID NO: 7968 - DNA, 20 bp, Artificial Sequence
  Description of Artificial Sequence: Synthetic oligonucleotide
tctcctgcctcagccacctg

SEQ ID NO: 7969 - DNA, 20 bp, Artificial Sequence
  Description of Artificial Sequence: Synthetic oligonucleotide
ctcctgcctcagccacctga

SEQ ID NO: 7970 - DNA, 20 bp, Artificial Sequence
  Description of Artificial Sequence: Synthetic oligonucleotide
tcctgcctcagccacctgag

SEQ ID NO: 7971 - DNA, 20 bp, Artificial Sequence
  Description of Artificial Sequence: Synthetic oligonucleotide
cctgcctcagccacctgagt

SEQ ID NO: 7972 - DNA, 20 bp, Artificial Sequence
  Description of Artificial Sequence: Synthetic oligonucleotide
ctgcctcagccacctgagta

SEQ ID NO: 7973 - DNA, 20 bp, Artificial Sequence
  Description of Artificial Sequence: Synthetic oligonucleotide
tgcctcagccacctgagtag

SEQ ID NO: 7974 - DNA, 20 bp, Artificial Sequence
  Description of Artificial Sequence: Synthetic oligonucleotide
gcctcagccacctgagtagc

SEQ ID NO: 7975 - DNA, 20 bp, Artificial Sequence
  Description of Artificial Sequence: Synthetic oligonucleotide
cctcagccacctgagtagct

SEQ ID NO: 7976 - DNA, 20 bp, Artificial Sequence
  Description of Artificial Sequence: Synthetic oligonucleotide
ctcagccacctgagtagctg

SEQ ID NO: 7977 - DNA, 20 bp, Artificial Sequence
  Description of Artificial Sequence: Synthetic oligonucleotide
tcagccacctgagtagctgg

SEQ ID NO: 7978 - DNA, 20 bp, Artificial Sequence
  Description of Artificial Sequence: Synthetic oligonucleotide
cagccacctgagtagctggg

SEQ ID NO: 7979 - DNA, 20 bp, Artificial Sequence
  Description of Artificial Sequence: Synthetic oligonucleotide
agccacctgagtagctggga

SEQ ID NO: 7980 - DNA, 20 bp, Artificial Sequence
  Description of Artificial Sequence: Synthetic oligonucleotide
gccacctgagtagctgggat

SEQ ID NO: 7981 - DNA, 20 bp, Artificial Sequence
  Description of Artificial Sequence: Synthetic oligonucleotide
ccacctgagtagctgggatt

SEQ ID NO: 7982 - DNA, 20 bp, Artificial Sequence
  Description of Artificial Sequence: Synthetic oligonucleotide
cacctgagtagctgggatta

SEQ ID NO: 7983 - DNA, 20 bp, Artificial Sequence
  Description of Artificial Sequence: Synthetic oligonucleotide
acctgagtagctgggattac

SEQ ID NO: 7984 - DNA, 20 bp, Artificial Sequence
  Description of Artificial Sequence: Synthetic oligonucleotide
cctgagtagctgggattaca

SEQ ID NO: 7985 - DNA, 20 bp, Artificial Sequence
  Description of Artificial Sequence: Synthetic oligonucleotide
ctgagtagctgggattacag

SEQ ID NO: 7986 - DNA, 20 bp, Artificial Sequence
  Description of Artificial Sequence: Synthetic oligonucleotide
tgagtagctgggattacagg

SEQ ID NO: 7987 - DNA, 20 bp, Artificial Sequence
  Description of Artificial Sequence: Synthetic oligonucleotide
gagtagctgggattacaggt

SEQ ID NO: 7988 - DNA, 20 bp, Artificial Sequence
  Description of Artificial Sequence: Synthetic oligonucleotide
agtagctgggattacaggtg

SEQ ID NO: 7989 - DNA, 20 bp, Artificial Sequence
  Description of Artificial Sequence: Synthetic oligonucleotide
gtagctgggattacaggtgc

SEQ ID NO: 7990 - DNA, 20 bp, Artificial Sequence
  Description of Artificial Sequence: Synthetic oligonucleotide
tagctgggattacaggtgca

SEQ ID NO: 7991 - DNA, 20 bp, Artificial Sequence
  Description of Artificial Sequence: Synthetic oligonucleotide
agctgggattacaggtgcac

SEQ ID NO: 7992 - DNA, 20 bp, Artificial Sequence
  Description of Artificial Sequence: Synthetic oligonucleotide
gctgggattacaggtgcaca

SEQ ID NO: 7993 - DNA, 20 bp, Artificial Sequence
  Description of Artificial Sequence: Synthetic oligonucleotide
ctgggattacaggtgcacac

SEQ ID NO: 7994 - DNA, 20 bp, Artificial Sequence
  Description of Artificial Sequence: Synthetic oligonucleotide
tgggattacaggtgcacacc

SEQ ID NO: 7995 - DNA, 20 bp, Artificial Sequence
  Description of Artificial Sequence: Synthetic oligonucleotide
gggattacaggtgcacacca

SEQ ID NO: 7996 - DNA, 20 bp, Artificial Sequence
  Description of Artificial Sequence: Synthetic oligonucleotide
ggattacaggtgcacaccac

SEQ ID NO: 7997 - DNA, 20 bp, Artificial Sequence
  Description of Artificial Sequence: Synthetic oligonucleotide
gattacaggtgcacaccacc

SEQ ID NO: 7998 - DNA, 20 bp, Artificial Sequence
  Description of Artificial Sequence: Synthetic oligonucleotide
attacaggtgcacaccacca

SEQ ID NO: 7999 - DNA, 20 bp, Artificial Sequence
  Description of Artificial Sequence: Synthetic oligonucleotide
ttacaggtgcacaccaccat

SEQ ID NO: 8000 - DNA, 20 bp, Artificial Sequence
  Description of Artificial Sequence: Synthetic oligonucleotide
tacaggtgcacaccaccatg

SEQ ID NO: 8001 - DNA, 20 bp, Artificial Sequence
  Description of Artificial Sequence: Synthetic oligonucleotide
acaggtgcacaccaccatgc

SEQ ID NO: 8002 - DNA, 20 bp, Artificial Sequence
  Description of Artificial Sequence: Synthetic oligonucleotide
caggtgcacaccaccatgcc

SEQ ID NO: 8003 - DNA, 20 bp, Artificial Sequence
  Description of Artificial Sequence: Synthetic oligonucleotide
aggtgcacaccaccatgccc

SEQ ID NO: 8004 - DNA, 20 bp, Artificial Sequence
  Description of Artificial Sequence: Synthetic oligonucleotide
ggtgcacaccaccatgcccg

SEQ ID NO: 8005 - DNA, 20 bp, Artificial Sequence
  Description of Artificial Sequence: Synthetic oligonucleotide
gtgcacaccaccatgcccgg

SEQ ID NO: 8006 - DNA, 20 bp, Artificial Sequence
  Description of Artificial Sequence: Synthetic oligonucleotide
tgcacaccaccatgcccggc

SEQ ID NO: 8007 - DNA, 20 bp, Artificial Sequence
  Description of Artificial Sequence: Synthetic oligonucleotide
gcacaccaccatgcccggct

SEQ ID NO: 8008 - DNA, 20 bp, Artificial Sequence
  Description of Artificial Sequence: Synthetic oligonucleotide
cacaccaccatgcccggcta

SEQ ID NO: 8009 - DNA, 20 bp, Artificial Sequence
  Description of Artificial Sequence: Synthetic oligonucleotide
acaccaccatgcccggctaa

SEQ ID NO: 8010 - DNA, 20 bp, Artificial Sequence
  Description of Artificial Sequence: Synthetic oligonucleotide
caccaccatgcccggctaat

SEQ ID NO: 8011 - DNA, 20 bp, Artificial Sequence
  Description of Artificial Sequence: Synthetic oligonucleotide
accaccatgcccggctaatt

SEQ ID NO: 8012 - DNA, 20 bp, Artificial Sequence
  Description of Artificial Sequence: Synthetic oligonucleotide
ccaccatgcccggctaattt

SEQ ID NO: 8013 - DNA, 20 bp, Artificial Sequence
  Description of Artificial Sequence: Synthetic oligonucleotide
caccatgcccggctaatttt

SEQ ID NO: 8014 - DNA, 20 bp, Artificial Sequence
  Description of Artificial Sequence: Synthetic oligonucleotide
accatgcccggctaattttt

SEQ ID NO: 8015 - DNA, 20 bp, Artificial Sequence
  Description of Artificial Sequence: Synthetic oligonucleotide
ccatgcccggctaatttttg

SEQ ID NO: 8016 - DNA, 20 bp, Artificial Sequence
  Description of Artificial Sequence: Synthetic oligonucleotide
catgcccggctaatttttgt

SEQ ID NO: 8017 - DNA, 20 bp, Artificial Sequence
  Description of Artificial Sequence: Synthetic oligonucleotide
atgcccggctaatttttgta

SEQ ID NO: 8018 - DNA, 20 bp, Artificial Sequence
  Description of Artificial Sequence: Synthetic oligonucleotide
tgcccggctaatttttgtat

SEQ ID NO: 8019 - DNA, 20 bp, Artificial Sequence
  Description of Artificial Sequence: Synthetic oligonucleotide
gcccggctaatttttgtatt

SEQ ID NO: 8020 - DNA, 20 bp, Artificial Sequence
  Description of Artificial Sequence: Synthetic oligonucleotide
cccggctaatttttgtattt

SEQ ID NO: 8021 - DNA, 20 bp, Artificial Sequence
  Description of Artificial Sequence: Synthetic oligonucleotide
ccggctaatttttgtatttt

SEQ ID NO: 8022 - DNA, 20 bp, Artificial Sequence
  Description of Artificial Sequence: Synthetic oligonucleotide
cggctaatttttgtattttt

SEQ ID NO: 8023 - DNA, 20 bp, Artificial Sequence
  Description of Artificial Sequence: Synthetic oligonucleotide
ggctaatttttgtattttta

SEQ ID NO: 8024 - DNA, 20 bp, Artificial Sequence
  Description of Artificial Sequence: Synthetic oligonucleotide
gctaatttttgtatttttag

SEQ ID NO: 8025 - DNA, 20 bp, Artificial Sequence
  Description of Artificial Sequence: Synthetic oligonucleotide
ctaatttttgtatttttagt

SEQ ID NO: 8026 - DNA, 20 bp, Artificial Sequence
  Description of Artificial Sequence: Synthetic oligonucleotide
taatttttgtatttttagta

SEQ ID NO: 8027 - DNA, 20 bp, Artificial Sequence
  Description of Artificial Sequence: Synthetic oligonucleotide
aatttttgtatttttagtag

SEQ ID NO: 8028 - DNA, 20 bp, Artificial Sequence
  Description of Artificial Sequence: Synthetic oligonucleotide
atttttgtatttttagtaga

SEQ ID NO: 8029 - DNA, 20 bp, Artificial Sequence
  Description of Artificial Sequence: Synthetic oligonucleotide
tttttgtatttttagtagag

SEQ ID NO: 8030 - DNA, 20 bp, Artificial Sequence
  Description of Artificial Sequence: Synthetic oligonucleotide
ttttgtatttttagtagaga

SEQ ID NO: 8031 - DNA, 20 bp, Artificial Sequence
  Description of Artificial Sequence: Synthetic oligonucleotide
tttgtatttttagtagagac

SEQ ID NO: 8032 - DNA, 20 bp, Artificial Sequence
  Description of Artificial Sequence: Synthetic oligonucleotide
ttgtatttttagtagagacg

SEQ ID NO: 8033 - DNA, 20 bp, Artificial Sequence
  Description of Artificial Sequence: Synthetic oligonucleotide
tgtatttttagtagagacgg

SEQ ID NO: 8034 - DNA, 20 bp, Artificial Sequence
  Description of Artificial Sequence: Synthetic oligonucleotide
gtatttttagtagagacggg

SEQ ID NO: 8035 - DNA, 20 bp, Artificial Sequence
  Description of Artificial Sequence: Synthetic oligonucleotide
tatttttagtagagacgggg

SEQ ID NO: 8036 - DNA, 20 bp, Artificial Sequence
  Description of Artificial Sequence: Synthetic oligonucleotide
atttttagtagagacggggt

SEQ ID NO: 8037 - DNA, 20 bp, Artificial Sequence
  Description of Artificial Sequence: Synthetic oligonucleotide
tttttagtagagacggggtt

SEQ ID NO: 8038 - DNA, 20 bp, Artificial Sequence
  Description of Artificial Sequence: Synthetic oligonucleotide
ttttagtagagacggggttt

SEQ ID NO: 8039 - DNA, 20 bp, Artificial Sequence
  Description of Artificial Sequence: Synthetic oligonucleotide
tttagtagagacggggtttc

SEQ ID NO: 8040 - DNA, 20 bp, Artificial Sequence
  Description of Artificial Sequence: Synthetic oligonucleotide
ttagtagagacggggtttca

SEQ ID NO: 8041 - DNA, 20 bp, Artificial Sequence
  Description of Artificial Sequence: Synthetic oligonucleotide
tagtagagacggggtttcac

SEQ ID NO: 8042 - DNA, 20 bp, Artificial Sequence
  Description of Artificial Sequence: Synthetic oligonucleotide
agtagagacggggtttcacc

SEQ ID NO: 8043 - DNA, 20 bp, Artificial Sequence
  Description of Artificial Sequence: Synthetic oligonucleotide
gtagagacggggtttcacca

SEQ ID NO: 8044 - DNA, 20 bp, Artificial Sequence
  Description of Artificial Sequence: Synthetic oligonucleotide
tagagacggggtttcaccat

SEQ ID NO: 8045 - DNA, 20 bp, Artificial Sequence
  Description of Artificial Sequence: Synthetic oligonucleotide
agagacggggtttcaccatg

SEQ ID NO: 8046 - DNA, 20 bp, Artificial Sequence
  Description of Artificial Sequence: Synthetic oligonucleotide
gagacggggtttcaccatgt

SEQ ID NO: 8047 - DNA, 20 bp, Artificial Sequence
  Description of Artificial Sequence: Synthetic oligonucleotide
agacggggtttcaccatgtt

SEQ ID NO: 8048 - DNA, 20 bp, Artificial Sequence
  Description of Artificial Sequence: Synthetic oligonucleotide
gacggggtttcaccatgttg

SEQ ID NO: 8049 - DNA, 20 bp, Artificial Sequence
  Description of Artificial Sequence: Synthetic oligonucleotide
acggggtttcaccatgttgg

SEQ ID NO: 8050 - DNA, 20 bp, Artificial Sequence
  Description of Artificial Sequence: Synthetic oligonucleotide
cggggtttcaccatgttggt

SEQ ID NO: 8051 - DNA, 20 bp, Artificial Sequence
  Description of Artificial Sequence: Synthetic oligonucleotide
ggggtttcaccatgttggtc

SEQ ID NO: 8052 - DNA, 20 bp, Artificial Sequence
  Description of Artificial Sequence: Synthetic oligonucleotide
gggtttcaccatgttggtca

SEQ ID NO: 8053 - DNA, 20 bp, Artificial Sequence
  Description of Artificial Sequence: Synthetic oligonucleotide
ggtttcaccatgttggtcag

SEQ ID NO: 8054 - DNA, 20 bp, Artificial Sequence
  Description of Artificial Sequence: Synthetic oligonucleotide
gtttcaccatgttggtcagg

SEQ ID NO: 8055 - DNA, 20 bp, Artificial Sequence
  Description of Artificial Sequence: Synthetic oligonucleotide
tttcaccatgttggtcaggc

SEQ ID NO: 8056 - DNA, 20 bp, Artificial Sequence
  Description of Artificial Sequence: Synthetic oligonucleotide
ttcaccatgttggtcaggct

SEQ ID NO: 8057 - DNA, 20 bp, Artificial Sequence
  Description of Artificial Sequence: Synthetic oligonucleotide
tcaccatgttggtcaggctg

SEQ ID NO: 8058 - DNA, 20 bp, Artificial Sequence
  Description of Artificial Sequence: Synthetic oligonucleotide
caccatgttggtcaggctgg

SEQ ID NO: 8059 - DNA, 20 bp, Artificial Sequence
  Description of Artificial Sequence: Synthetic oligonucleotide
accatgttggtcaggctggt

SEQ ID NO: 8060 - DNA, 20 bp, Artificial Sequence
  Description of Artificial Sequence: Synthetic oligonucleotide
ccatgttggtcaggctggtc

SEQ ID NO: 8061 - DNA, 20 bp, Artificial Sequence
  Description of Artificial Sequence: Synthetic oligonucleotide
catgttggtcaggctggtct

SEQ ID NO: 8062 - DNA, 20 bp, Artificial Sequence
  Description of Artificial Sequence: Synthetic oligonucleotide
atgttggtcaggctggtctc

SEQ ID NO: 8063 - DNA, 20 bp, Artificial Sequence
  Description of Artificial Sequence: Synthetic oligonucleotide
tgttggtcaggctggtctcg

SEQ ID NO: 8064 - DNA, 20 bp, Artificial Sequence
  Description of Artificial Sequence: Synthetic oligonucleotide
gttggtcaggctggtctcga

SEQ ID NO: 8065 - DNA, 20 bp, Artificial Sequence
  Description of Artificial Sequence: Synthetic oligonucleotide
ttggtcaggctggtctcgaa

SEQ ID NO: 8066 - DNA, 20 bp, Artificial Sequence
  Description of Artificial Sequence: Synthetic oligonucleotide
tggtcaggctggtctcgaac

SEQ ID NO: 8067 - DNA, 20 bp, Artificial Sequence
  Description of Artificial Sequence: Synthetic oligonucleotide
ggtcaggctggtctcgaact

SEQ ID NO: 8068 - DNA, 20 bp, Artificial Sequence
  Description of Artificial Sequence: Synthetic oligonucleotide
gtcaggctggtctcgaactc

SEQ ID NO: 8069 - DNA, 20 bp, Artificial Sequence
  Description of Artificial Sequence: Synthetic oligonucleotide
tcaggctggtctcgaactcc

SEQ ID NO: 8070 - DNA, 20 bp, Artificial Sequence
  Description of Artificial Sequence: Synthetic oligonucleotide
caggctggtctcgaactcct

SEQ ID NO: 8071 - DNA, 20 bp, Artificial Sequence
  Description of Artificial Sequence: Synthetic oligonucleotide
aggctggtctcgaactcctg

SEQ ID NO: 8072 - DNA, 20 bp, Artificial Sequence
  Description of Artificial Sequence: Synthetic oligonucleotide
ggctggtctcgaactcctga

SEQ ID NO: 8073 - DNA, 20 bp, Artificial Sequence
  Description of Artificial Sequence: Synthetic oligonucleotide
gctggtctcgaactcctgac

SEQ ID NO: 8074 - DNA, 20 bp, Artificial Sequence
  Description of Artificial Sequence: Synthetic oligonucleotide
ctggtctcgaactcctgacc

SEQ ID NO: 8075 - DNA, 20 bp, Artificial Sequence
  Description of Artificial Sequence: Synthetic oligonucleotide
tggtctcgaactcctgacct

SEQ ID NO: 8076 - DNA, 20 bp, Artificial Sequence
  Description of Artificial Sequence: Synthetic oligonucleotide
ggtctcgaactcctgacctc

SEQ ID NO: 8077 - DNA, 20 bp, Artificial Sequence
  Description of Artificial Sequence: Synthetic oligonucleotide
gtctcgaactcctgacctcg

SEQ ID NO: 8078 - DNA, 20 bp, Artificial Sequence
  Description of Artificial Sequence: Synthetic oligonucleotide
tctcgaactcctgacctcgt

SEQ ID NO: 8079 - DNA, 20 bp, Artificial Sequence
  Description of Artificial Sequence: Synthetic oligonucleotide
ctcgaactcctgacctcgtg

SEQ ID NO: 8080 - DNA, 20 bp, Artificial Sequence
  Description of Artificial Sequence: Synthetic oligonucleotide
tcgaactcctgacctcgtga

SEQ ID NO: 8081 - DNA, 20 bp, Artificial Sequence
  Description of Artificial Sequence: Synthetic oligonucleotide
cgaactcctgacctcgtgat

SEQ ID NO: 8082 - DNA, 20 bp, Artificial Sequence
  Description of Artificial Sequence: Synthetic oligonucleotide
gaactcctgacctcgtgatc

SEQ ID NO: 8083 - DNA, 20 bp, Artificial Sequence
  Description of Artificial Sequence: Synthetic oligonucleotide
aactcctgacctcgtgatct

SEQ ID NO: 8084 - DNA, 20 bp, Artificial Sequence
  Description of Artificial Sequence: Synthetic oligonucleotide
actcctgacctcgtgatctg

SEQ ID NO: 8085 - DNA, 20 bp, Artificial Sequence
  Description of Artificial Sequence: Synthetic oligonucleotide
ctcctgacctcgtgatctgt

SEQ ID NO: 8086 - DNA, 20 bp, Artificial Sequence
  Description of Artificial Sequence: Synthetic oligonucleotide
tcctgacctcgtgatctgtc

SEQ ID NO: 8087 - DNA, 20 bp, Artificial Sequence
  Description of Artificial Sequence: Synthetic oligonucleotide
cctgacctcgtgatctgtct

SEQ ID NO: 8088 - DNA, 20 bp, Artificial Sequence
  Description of Artificial Sequence: Synthetic oligonucleotide
ctgacctcgtgatctgtctg

SEQ ID NO: 8089 - DNA, 20 bp, Artificial Sequence
  Description of Artificial Sequence: Synthetic oligonucleotide
tgacctcgtgatctgtctgc

SEQ ID NO: 8090 - DNA, 20 bp, Artificial Sequence
  Description of Artificial Sequence: Synthetic oligonucleotide
gacctcgtgatctgtctgcc

SEQ ID NO: 8091 - DNA, 20 bp, Artificial Sequence
  Description of Artificial Sequence: Synthetic oligonucleotide
acctcgtgatctgtctgcct

SEQ ID NO: 8092 - DNA, 20 bp, Artificial Sequence
  Description of Artificial Sequence: Synthetic oligonucleotide
cctcgtgatctgtctgcctc

SEQ ID NO: 8093 - DNA, 20 bp, Artificial Sequence
  Description of Artificial Sequence: Synthetic oligonucleotide
ctcgtgatctgtctgcctca

SEQ ID NO: 8094 - DNA, 20 bp, Artificial Sequence
  Description of Artificial Sequence: Synthetic oligonucleotide
tcgtgatctgtctgcctcaa

SEQ ID NO: 8095 - DNA, 20 bp, Artificial Sequence
  Description of Artificial Sequence: Synthetic oligonucleotide
cgtgatctgtctgcctcaac

SEQ ID NO: 8096 - DNA, 20 bp, Artificial Sequence
  Description of Artificial Sequence: Synthetic oligonucleotide
gtgatctgtctgcctcaacc

SEQ ID NO: 8097 - DNA, 20 bp, Artificial Sequence
  Description of Artificial Sequence: Synthetic oligonucleotide
tgatctgtctgcctcaacct

SEQ ID NO: 8098 - DNA, 20 bp, Artificial Sequence
  Description of Artificial Sequence: Synthetic oligonucleotide
gatctgtctgcctcaacctc

SEQ ID NO: 8099 - DNA, 20 bp, Artificial Sequence
  Description of Artificial Sequence: Synthetic oligonucleotide
atctgtctgcctcaacctcc

SEQ ID NO: 8100 - DNA, 20 bp, Artificial Sequence
  Description of Artificial Sequence: Synthetic oligonucleotide
tctgtctgcctcaacctccc

SEQ ID NO: 8101 - DNA, 20 bp, Artificial Sequence
  Description of Artificial Sequence: Synthetic oligonucleotide
ctgtctgcctcaacctccca

SEQ ID NO: 8102 - DNA, 20 bp, Artificial Sequence
  Description of Artificial Sequence: Synthetic oligonucleotide
tgtctgcctcaacctcccaa

SEQ ID NO: 8103 - DNA, 20 bp, Artificial Sequence
  Description of Artificial Sequence: Synthetic oligonucleotide
gtctgcctcaacctcccaaa

SEQ ID NO: 8104 - DNA, 20 bp, Artificial Sequence
  Description of Artificial Sequence: Synthetic oligonucleotide
tctgcctcaacctcccaaag

SEQ ID NO: 8105 - DNA, 20 bp, Artificial Sequence
  Description of Artificial Sequence: Synthetic oligonucleotide
ctgcctcaacctcccaaagt

SEQ ID NO: 8106 - DNA, 20 bp, Artificial Sequence
  Description of Artificial Sequence: Synthetic oligonucleotide
tgcctcaacctcccaaagtg

SEQ ID NO: 8107 - DNA, 20 bp, Artificial Sequence
  Description of Artificial Sequence: Synthetic oligonucleotide
gcctcaacctcccaaagtgc

SEQ ID NO: 8108 - DNA, 20 bp, Artificial Sequence
  Description of Artificial Sequence: Synthetic oligonucleotide
cctcaacctcccaaagtgct

SEQ ID NO: 8109 - DNA, 20 bp, Artificial Sequence
  Description of Artificial Sequence: Synthetic oligonucleotide
ctcaacctcccaaagtgctg

SEQ ID NO: 8110 - DNA, 20 bp, Artificial Sequence
  Description of Artificial Sequence: Synthetic oligonucleotide
tcaacctcccaaagtgctgg

SEQ ID NO: 8111 - DNA, 20 bp, Artificial Sequence
  Description of Artificial Sequence: Synthetic oligonucleotide
caacctcccaaagtgctggg

SEQ ID NO: 8112 - DNA, 20 bp, Artificial Sequence
  Description of Artificial Sequence: Synthetic oligonucleotide
aacctcccaaagtgctggga

SEQ ID NO: 8113 - DNA, 20 bp, Artificial Sequence
  Description of Artificial Sequence: Synthetic oligonucleotide
acctcccaaagtgctgggat

SEQ ID NO: 8114 - DNA, 20 bp, Artificial Sequence
  Description of Artificial Sequence: Synthetic oligonucleotide
cctcccaaagtgctgggatt

SEQ ID NO: 8115 - DNA, 20 bp, Artificial Sequence
  Description of Artificial Sequence: Synthetic oligonucleotide
ctcccaaagtgctgggatta

SEQ ID NO: 8116 - DNA, 20 bp, Artificial Sequence
  Description of Artificial Sequence: Synthetic oligonucleotide
tcccaaagtgctgggattac

SEQ ID NO: 8117 - DNA, 20 bp, Artificial Sequence
  Description of Artificial Sequence: Synthetic oligonucleotide
cccaaagtgctgggattaca

SEQ ID NO: 8118 - DNA, 20 bp, Artificial Sequence
  Description of Artificial Sequence: Synthetic oligonucleotide
ccaaagtgctgggattacag

SEQ ID NO: 8119 - DNA, 20 bp, Artificial Sequence
  Description of Artificial Sequence: Synthetic oligonucleotide
caaagtgctgggattacagg

SEQ ID NO: 8120 - DNA, 20 bp, Artificial Sequence
  Description of Artificial Sequence: Synthetic oligonucleotide
aaagtgctgggattacaggt

SEQ ID NO: 8121 - DNA, 20 bp, Artificial Sequence
  Description of Artificial Sequence: Synthetic oligonucleotide
aagtgctgggattacaggtg

SEQ ID NO: 8122 - DNA, 20 bp, Artificial Sequence
  Description of Artificial Sequence: Synthetic oligonucleotide
agtgctgggattacaggtgt

SEQ ID NO: 8123 - DNA, 20 bp, Artificial Sequence
  Description of Artificial Sequence: Synthetic oligonucleotide
gtgctgggattacaggtgtg

SEQ ID NO: 8124 - DNA, 20 bp, Artificial Sequence
  Description of Artificial Sequence: Synthetic oligonucleotide
tgctgggattacaggtgtga

SEQ ID NO: 8125 - DNA, 20 bp, Artificial Sequence
  Description of Artificial Sequence: Synthetic oligonucleotide
gctgggattacaggtgtgag

SEQ ID NO: 8126 - DNA, 20 bp, Artificial Sequence
  Description of Artificial Sequence: Synthetic oligonucleotide
ctgggattacaggtgtgagc

SEQ ID NO: 8127 - DNA, 20 bp, Artificial Sequence
  Description of Artificial Sequence: Synthetic oligonucleotide
tgggattacaggtgtgagcc

SEQ ID NO: 8128 - DNA, 20 bp, Artificial Sequence
  Description of Artificial Sequence: Synthetic oligonucleotide
gggattacaggtgtgagcca

SEQ ID NO: 8129 - DNA, 20 bp, Artificial Sequence
  Description of Artificial Sequence: Synthetic oligonucleotide
ggattacaggtgtgagccac

SEQ ID NO: 8130 - DNA, 20 bp, Artificial Sequence
  Description of Artificial Sequence: Synthetic oligonucleotide
gattacaggtgtgagccact

SEQ ID NO: 8131 - DNA, 20 bp, Artificial Sequence
  Description of Artificial Sequence: Synthetic oligonucleotide
attacaggtgtgagccactg

SEQ ID NO: 8132 - DNA, 20 bp, Artificial Sequence
  Description of Artificial Sequence: Synthetic oligonucleotide
ttacaggtgtgagccactgc

SEQ ID NO: 8133 - DNA, 20 bp, Artificial Sequence
  Description of Artificial Sequence: Synthetic oligonucleotide
tacaggtgtgagccactgca

SEQ ID NO: 8134 - DNA, 20 bp, Artificial Sequence
  Description of Artificial Sequence: Synthetic oligonucleotide
acaggtgtgagccactgcac

SEQ ID NO: 8135 - DNA, 20 bp, Artificial Sequence
  Description of Artificial Sequence: Synthetic oligonucleotide
caggtgtgagccactgcact

SEQ ID NO: 8136 - DNA, 20 bp, Artificial Sequence
  Description of Artificial Sequence: Synthetic oligonucleotide
aggtgtgagccactgcactt

SEQ ID NO: 8137 - DNA, 20 bp, Artificial Sequence
  Description of Artificial Sequence: Synthetic oligonucleotide
ggtgtgagccactgcacttg

SEQ ID NO: 8138 - DNA, 20 bp, Artificial Sequence
  Description of Artificial Sequence: Synthetic oligonucleotide
gtgtgagccactgcacttgg

SEQ ID NO: 8139 - DNA, 20 bp, Artificial Sequence
  Description of Artificial Sequence: Synthetic oligonucleotide
tgtgagccactgcacttggc

SEQ ID NO: 8140 - DNA, 20 bp, Artificial Sequence
  Description of Artificial Sequence: Synthetic oligonucleotide
gtgagccactgcacttggcc

SEQ ID NO: 8141 - DNA, 20 bp, Artificial Sequence
  Description of Artificial Sequence: Synthetic oligonucleotide
tgagccactgcacttggcct

SEQ ID NO: 8142 - DNA, 20 bp, Artificial Sequence
  Description of Artificial Sequence: Synthetic oligonucleotide
gagccactgcacttggcctt

SEQ ID NO: 8143 - DNA, 20 bp, Artificial Sequence
  Description of Artificial Sequence: Synthetic oligonucleotide
agccactgcacttggccttt

SEQ ID NO: 8144 - DNA, 20 bp, Artificial Sequence
  Description of Artificial Sequence: Synthetic oligonucleotide
gccactgcacttggcctttt

SEQ ID NO: 8145 - DNA, 20 bp, Artificial Sequence
  Description of Artificial Sequence: Synthetic oligonucleotide
ccactgcacttggccttttt

SEQ ID NO: 8146 - DNA, 20 bp, Artificial Sequence
  Description of Artificial Sequence: Synthetic oligonucleotide
cactgcacttggcctttttt

SEQ ID NO: 8147 - DNA, 20 bp, Artificial Sequence
  Description of Artificial Sequence: Synthetic oligonucleotide
actgcacttggccttttttt

SEQ ID NO: 8148 - DNA, 20 bp, Artificial Sequence
  Description of Artificial Sequence: Synthetic oligonucleotide
ctgcacttggcctttttttt

SEQ ID NO: 8149 - DNA, 20 bp, Artificial Sequence
  Description of Artificial Sequence: Synthetic oligonucleotide
tgcacttggccttttttttt

SEQ ID NO: 8150 - DNA, 20 bp, Artificial Sequence
  Description of Artificial Sequence: Synthetic oligonucleotide
gcacttggccttttttttta

SEQ ID NO: 8151 - DNA, 20 bp, Artificial Sequence
  Description of Artificial Sequence: Synthetic oligonucleotide
cacttggcctttttttttac

SEQ ID NO: 8152 - DNA, 20 bp, Artificial Sequence
  Description of Artificial Sequence: Synthetic oligonucleotide
acttggcctttttttttact

SEQ ID NO: 8153 - DNA, 20 bp, Artificial Sequence
  Description of Artificial Sequence: Synthetic oligonucleotide
cttggcctttttttttactt

SEQ ID NO: 8154 - DNA, 20 bp, Artificial Sequence
  Description of Artificial Sequence: Synthetic oligonucleotide
ttggcctttttttttacttt

SEQ ID NO: 8155 - DNA, 20 bp, Artificial Sequence
  Description of Artificial Sequence: Synthetic oligonucleotide
tggcctttttttttactttt

SEQ ID NO: 8156 - DNA, 20 bp, Artificial Sequence
  Description of Artificial Sequence: Synthetic oligonucleotide
ggcctttttttttactttta

SEQ ID NO: 8157 - DNA, 20 bp, Artificial Sequence
  Description of Artificial Sequence: Synthetic oligonucleotide
gcctttttttttacttttac

SEQ ID NO: 8158 - DNA, 20 bp, Artificial Sequence
  Description of Artificial Sequence: Synthetic oligonucleotide
cctttttttttacttttaca

SEQ ID NO: 8159 - DNA, 20 bp, Artificial Sequence
  Description of Artificial Sequence: Synthetic oligonucleotide
ctttttttttacttttacaa

SEQ ID NO: 8160 - DNA, 20 bp, Artificial Sequence
  Description of Artificial Sequence: Synthetic oligonucleotide
tttttttttacttttacaaa

SEQ ID NO: 8161 - DNA, 20 bp, Artificial Sequence
  Description of Artificial Sequence: Synthetic oligonucleotide
ttttttttacttttacaaaa

SEQ ID NO: 8162 - DNA, 20 bp, Artificial Sequence
  Description of Artificial Sequence: Synthetic oligonucleotide
tttttttacttttacaaaat

SEQ ID NO: 8163 - DNA, 20 bp, Artificial Sequence
  Description of Artificial Sequence: Synthetic oligonucleotide
ttttttacttttacaaaatt

SEQ ID NO: 8164 - DNA, 20 bp, Artificial Sequence
  Description of Artificial Sequence: Synthetic oligonucleotide
tttttacttttacaaaattt

SEQ ID NO: 8165 - DNA, 20 bp, Artificial Sequence
  Description of Artificial Sequence: Synthetic oligonucleotide
ttttacttttacaaaatttt

SEQ ID NO: 8166 - DNA, 20 bp, Artificial Sequence
  Description of Artificial Sequence: Synthetic oligonucleotide
tttacttttacaaaattttt

SEQ ID NO: 8167 - DNA, 20 bp, Artificial Sequence
  Description of Artificial Sequence: Synthetic oligonucleotide
ttacttttacaaaatttttt

SEQ ID NO: 8168 - DNA, 20 bp, Artificial Sequence
  Description of Artificial Sequence: Synthetic oligonucleotide
tacttttacaaaattttttg

SEQ ID NO: 8169 - DNA, 20 bp, Artificial Sequence
  Description of Artificial Sequence: Synthetic oligonucleotide
acttttacaaaattttttgt

SEQ ID NO: 8170 - DNA, 20 bp, Artificial Sequence
  Description of Artificial Sequence: Synthetic oligonucleotide
cttttacaaaattttttgta

SEQ ID NO: 8171 - DNA, 20 bp, Artificial Sequence
  Description of Artificial Sequence: Synthetic oligonucleotide
ttttacaaaattttttgtaa

SEQ ID NO: 8172 - DNA, 20 bp, Artificial Sequence
  Description of Artificial Sequence: Synthetic oligonucleotide
tttacaaaattttttgtaaa

SEQ ID NO: 8173 - DNA, 20 bp, Artificial Sequence
  Description of Artificial Sequence: Synthetic oligonucleotide
ttacaaaattttttgtaaag

SEQ ID NO: 8174 - DNA, 20 bp, Artificial Sequence
  Description of Artificial Sequence: Synthetic oligonucleotide
tacaaaattttttgtaaaga

SEQ ID NO: 8175 - DNA, 20 bp, Artificial Sequence
  Description of Artificial Sequence: Synthetic oligonucleotide
acaaaattttttgtaaagat

SEQ ID NO: 8176 - DNA, 20 bp, Artificial Sequence
  Description of Artificial Sequence: Synthetic oligonucleotide
caaaattttttgtaaagatg

SEQ ID NO: 8177 - DNA, 20 bp, Artificial Sequence
  Description of Artificial Sequence: Synthetic oligonucleotide
aaaattttttgtaaagatga

SEQ ID NO: 8178 - DNA, 20 bp, Artificial Sequence
  Description of Artificial Sequence: Synthetic oligonucleotide
aaattttttgtaaagatgag

SEQ ID NO: 8179 - DNA, 20 bp, Artificial Sequence
  Description of Artificial Sequence: Synthetic oligonucleotide
aattttttgtaaagatgagc

SEQ ID NO: 8180 - DNA, 20 bp, Artificial Sequence
  Description of Artificial Sequence: Synthetic oligonucleotide
attttttgtaaagatgagct

SEQ ID NO: 8181 - DNA, 20 bp, Artificial Sequence
  Description of Artificial Sequence: Synthetic oligonucleotide
ttttttgtaaagatgagctc

SEQ ID NO: 8182 - DNA, 20 bp, Artificial Sequence
  Description of Artificial Sequence: Synthetic oligonucleotide
tttttgtaaagatgagctct

SEQ ID NO: 8183 - DNA, 20 bp, Artificial Sequence
  Description of Artificial Sequence: Synthetic oligonucleotide
ttttgtaaagatgagctctc

SEQ ID NO: 8184 - DNA, 20 bp, Artificial Sequence
  Description of Artificial Sequence: Synthetic oligonucleotide
tttgtaaagatgagctctca

SEQ ID NO: 8185 - DNA, 20 bp, Artificial Sequence
  Description of Artificial Sequence: Synthetic oligonucleotide
ttgtaaagatgagctctcac

SEQ ID NO: 8186 - DNA, 20 bp, Artificial Sequence
  Description of Artificial Sequence: Synthetic oligonucleotide
tgtaaagatgagctctcact

SEQ ID NO: 8187 - DNA, 20 bp, Artificial Sequence
  Description of Artificial Sequence: Synthetic oligonucleotide
gtaaagatgagctctcacta

SEQ ID NO: 8188 - DNA, 20 bp, Artificial Sequence
  Description of Artificial Sequence: Synthetic oligonucleotide
taaagatgagctctcactat

SEQ ID NO: 8189 - DNA, 20 bp, Artificial Sequence
  Description of Artificial Sequence: Synthetic oligonucleotide
aaagatgagctctcactatg

SEQ ID NO: 8190 - DNA, 20 bp, Artificial Sequence
  Description of Artificial Sequence: Synthetic oligonucleotide
aagatgagctctcactatgt

SEQ ID NO: 8191 - DNA, 20 bp, Artificial Sequence
  Description of Artificial Sequence: Synthetic oligonucleotide
agatgagctctcactatgtt

SEQ ID NO: 8192 - DNA, 20 bp, Artificial Sequence
  Description of Artificial Sequence: Synthetic oligonucleotide
gatgagctctcactatgttg

SEQ ID NO: 8193 - DNA, 20 bp, Artificial Sequence
  Description of Artificial Sequence: Synthetic oligonucleotide
atgagctctcactatgttgt

SEQ ID NO: 8194 - DNA, 20 bp, Artificial Sequence
  Description of Artificial Sequence: Synthetic oligonucleotide
tgagctctcactatgttgtc

SEQ ID NO: 8195 - DNA, 20 bp, Artificial Sequence
  Description of Artificial Sequence: Synthetic oligonucleotide
gagctctcactatgttgtcc

SEQ ID NO: 8196 - DNA, 20 bp, Artificial Sequence
  Description of Artificial Sequence: Synthetic oligonucleotide
agctctcactatgttgtcca

SEQ ID NO: 8197 - DNA, 20 bp, Artificial Sequence
  Description of Artificial Sequence: Synthetic oligonucleotide
gctctcactatgttgtccag

SEQ ID NO: 8198 - DNA, 20 bp, Artificial Sequence
  Description of Artificial Sequence: Synthetic oligonucleotide
ctctcactatgttgtccagg

SEQ ID NO: 8199 - DNA, 20 bp, Artificial Sequence
  Description of Artificial Sequence: Synthetic oligonucleotide
tctcactatgttgtccaggc

SEQ ID NO: 8200 - DNA, 20 bp, Artificial Sequence
  Description of Artificial Sequence: Synthetic oligonucleotide
ctcactatgttgtccaggct

SEQ ID NO: 8201 - DNA, 20 bp, Artificial Sequence
  Description of Artificial Sequence: Synthetic oligonucleotide
tcactatgttgtccaggctg

SEQ ID NO: 8202 - DNA, 20 bp, Artificial Sequence
  Description of Artificial Sequence: Synthetic oligonucleotide
cactatgttgtccaggctgg

SEQ ID NO: 8203 - DNA, 20 bp, Artificial Sequence
  Description of Artificial Sequence: Synthetic oligonucleotide
actatgttgtccaggctggt

SEQ ID NO: 8204 - DNA, 20 bp, Artificial Sequence
  Description of Artificial Sequence: Synthetic oligonucleotide
ctatgttgtccaggctggtc

SEQ ID NO: 8205 - DNA, 20 bp, Artificial Sequence
  Description of Artificial Sequence: Synthetic oligonucleotide
tatgttgtccaggctggtct

SEQ ID NO: 8206 - DNA, 20 bp, Artificial Sequence
  Description of Artificial Sequence: Synthetic oligonucleotide
atgttgtccaggctggtctc

SEQ ID NO: 8207 - DNA, 20 bp, Artificial Sequence
  Description of Artificial Sequence: Synthetic oligonucleotide
tgttgtccaggctggtctcg

SEQ ID NO: 8208 - DNA, 20 bp, Artificial Sequence
  Description of Artificial Sequence: Synthetic oligonucleotide
gttgtccaggctggtctcga

SEQ ID NO: 8209 - DNA, 20 bp, Artificial Sequence
  Description of Artificial Sequence: Synthetic oligonucleotide
ttgtccaggctggtctcgaa

SEQ ID NO: 8210 - DNA, 20 bp, Artificial Sequence
  Description of Artificial Sequence: Synthetic oligonucleotide
tgtccaggctggtctcgaac

SEQ ID NO: 8211 - DNA, 20 bp, Artificial Sequence
  Description of Artificial Sequence: Synthetic oligonucleotide
gtccaggctggtctcgaact

SEQ ID NO: 8212 - DNA, 20 bp, Artificial Sequence
  Description of Artificial Sequence: Synthetic oligonucleotide
tccaggctggtctcgaactt

SEQ ID NO: 8213 - DNA, 20 bp, Artificial Sequence
  Description of Artificial Sequence: Synthetic oligonucleotide
ccaggctggtctcgaacttc

SEQ ID NO: 8214 - DNA, 20 bp, Artificial Sequence
  Description of Artificial Sequence: Synthetic oligonucleotide
caggctggtctcgaacttct

SEQ ID NO: 8215 - DNA, 20 bp, Artificial Sequence
  Description of Artificial Sequence: Synthetic oligonucleotide
aggctggtctcgaacttctg

SEQ ID NO: 8216 - DNA, 20 bp, Artificial Sequence
  Description of Artificial Sequence: Synthetic oligonucleotide
ggctggtctcgaacttctgg

SEQ ID NO: 8217 - DNA, 20 bp, Artificial Sequence
  Description of Artificial Sequence: Synthetic oligonucleotide
gctggtctcgaacttctggg

SEQ ID NO: 8218 - DNA, 20 bp, Artificial Sequence
  Description of Artificial Sequence: Synthetic oligonucleotide
ctggtctcgaacttctgggc

SEQ ID NO: 8219 - DNA, 20 bp, Artificial Sequence
  Description of Artificial Sequence: Synthetic oligonucleotide
tggtctcgaacttctgggct

SEQ ID NO: 8220 - DNA, 20 bp, Artificial Sequence
  Description of Artificial Sequence: Synthetic oligonucleotide
ggtctcgaacttctgggctc

SEQ ID NO: 8221 - DNA, 20 bp, Artificial Sequence
  Description of Artificial Sequence: Synthetic oligonucleotide
gtctcgaacttctgggctca

SEQ ID NO: 8222 - DNA, 20 bp, Artificial Sequence
  Description of Artificial Sequence: Synthetic oligonucleotide
tctcgaacttctgggctcaa

SEQ ID NO: 8223 - DNA, 20 bp, Artificial Sequence
  Description of Artificial Sequence: Synthetic oligonucleotide
ctcgaacttctgggctcaag

SEQ ID NO: 8224 - DNA, 20 bp, Artificial Sequence
  Description of Artificial Sequence: Synthetic oligonucleotide
tcgaacttctgggctcaagt

SEQ ID NO: 8225 - DNA, 20 bp, Artificial Sequence
  Description of Artificial Sequence: Synthetic oligonucleotide
cgaacttctgggctcaagtg

SEQ ID NO: 8226 - DNA, 20 bp, Artificial Sequence
  Description of Artificial Sequence: Synthetic oligonucleotide
gaacttctgggctcaagtga

SEQ ID NO: 8227 - DNA, 20 bp, Artificial Sequence
  Description of Artificial Sequence: Synthetic oligonucleotide
aacttctgggctcaagtgat

SEQ ID NO: 8228 - DNA, 20 bp, Artificial Sequence
  Description of Artificial Sequence: Synthetic oligonucleotide
acttctgggctcaagtgatc

SEQ ID NO: 8229 - DNA, 20 bp, Artificial Sequence
  Description of Artificial Sequence: Synthetic oligonucleotide
cttctgggctcaagtgatcc

SEQ ID NO: 8230 - DNA, 20 bp, Artificial Sequence
  Description of Artificial Sequence: Synthetic oligonucleotide
ttctgggctcaagtgatcct

SEQ ID NO: 8231 - DNA, 20 bp, Artificial Sequence
  Description of Artificial Sequence: Synthetic oligonucleotide
tctgggctcaagtgatcctc

SEQ ID NO: 8232 - DNA, 20 bp, Artificial Sequence
  Description of Artificial Sequence: Synthetic oligonucleotide
ctgggctcaagtgatcctca

SEQ ID NO: 8233 - DNA, 20 bp, Artificial Sequence
  Description of Artificial Sequence: Synthetic oligonucleotide
tgggctcaagtgatcctcat

SEQ ID NO: 8234 - DNA, 20 bp, Artificial Sequence
  Description of Artificial Sequence: Synthetic oligonucleotide
gggctcaagtgatcctcatg

SEQ ID NO: 8235 - DNA, 20 bp, Artificial Sequence
  Description of Artificial Sequence: Synthetic oligonucleotide
ggctcaagtgatcctcatga

SEQ ID NO: 8236 - DNA, 20 bp, Artificial Sequence
  Description of Artificial Sequence: Synthetic oligonucleotide
gctcaagtgatcctcatgat

SEQ ID NO: 8237 - DNA, 20 bp, Artificial Sequence
  Description of Artificial Sequence: Synthetic oligonucleotide
ctcaagtgatcctcatgata

SEQ ID NO: 8238 - DNA, 20 bp, Artificial Sequence
  Description of Artificial Sequence: Synthetic oligonucleotide
tcaagtgatcctcatgatag

SEQ ID NO: 8239 - DNA, 20 bp, Artificial Sequence
  Description of Artificial Sequence: Synthetic oligonucleotide
caagtgatcctcatgatagg

SEQ ID NO: 8240 - DNA, 20 bp, Artificial Sequence
  Description of Artificial Sequence: Synthetic oligonucleotide
aagtgatcctcatgataggc

SEQ ID NO: 8241 - DNA, 20 bp, Artificial Sequence
  Description of Artificial Sequence: Synthetic oligonucleotide
agtgatcctcatgataggcc

SEQ ID NO: 8242 - DNA, 20 bp, Artificial Sequence
  Description of Artificial Sequence: Synthetic oligonucleotide
gtgatcctcatgataggcct

SEQ ID NO: 8243 - DNA, 20 bp, Artificial Sequence
  Description of Artificial Sequence: Synthetic oligonucleotide
tgatcctcatgataggcctc

SEQ ID NO: 8244 - DNA, 20 bp, Artificial Sequence
  Description of Artificial Sequence: Synthetic oligonucleotide
gatcctcatgataggcctcc

SEQ ID NO: 8245 - DNA, 20 bp, Artificial Sequence
  Description of Artificial Sequence: Synthetic oligonucleotide
atcctcatgataggcctccc

SEQ ID NO: 8246 - DNA, 20 bp, Artificial Sequence
  Description of Artificial Sequence: Synthetic oligonucleotide
tcctcatgataggcctccca

SEQ ID NO: 8247 - DNA, 20 bp, Artificial Sequence
  Description of Artificial Sequence: Synthetic oligonucleotide
cctcatgataggcctcccaa

SEQ ID NO: 8248 - DNA, 20 bp, Artificial Sequence
  Description of Artificial Sequence: Synthetic oligonucleotide
ctcatgataggcctcccaaa

SEQ ID NO: 8249 - DNA, 20 bp, Artificial Sequence
  Description of Artificial Sequence: Synthetic oligonucleotide
tcatgataggcctcccaaag

SEQ ID NO: 8250 - DNA, 20 bp, Artificial Sequence
  Description of Artificial Sequence: Synthetic oligonucleotide
catgataggcctcccaaagt

SEQ ID NO: 8251 - DNA, 20 bp, Artificial Sequence
  Description of Artificial Sequence: Synthetic oligonucleotide
atgataggcctcccaaagtg

SEQ ID NO: 8252 - DNA, 20 bp, Artificial Sequence
  Description of Artificial Sequence: Synthetic oligonucleotide
tgataggcctcccaaagtgt

SEQ ID NO: 8253 - DNA, 20 bp, Artificial Sequence
  Description of Artificial Sequence: Synthetic oligonucleotide
gataggcctcccaaagtgtc

SEQ ID NO: 8254 - DNA, 20 bp, Artificial Sequence
  Description of Artificial Sequence: Synthetic oligonucleotide
ataggcctcccaaagtgtcg

SEQ ID NO: 8255 - DNA, 20 bp, Artificial Sequence
  Description of Artificial Sequence: Synthetic oligonucleotide
taggcctcccaaagtgtcgg

SEQ ID NO: 8256 - DNA, 20 bp, Artificial Sequence
  Description of Artificial Sequence: Synthetic oligonucleotide
aggcctcccaaagtgtcggg

SEQ ID NO: 8257 - DNA, 20 bp, Artificial Sequence
  Description of Artificial Sequence: Synthetic oligonucleotide
ggcctcccaaagtgtcggga

SEQ ID NO: 8258 - DNA, 20 bp, Artificial Sequence
  Description of Artificial Sequence: Synthetic oligonucleotide
gcctcccaaagtgtcgggat

SEQ ID NO: 8259 - DNA, 20 bp, Artificial Sequence
  Description of Artificial Sequence: Synthetic oligonucleotide
cctcccaaagtgtcgggatt

SEQ ID NO: 8260 - DNA, 20 bp, Artificial Sequence
  Description of Artificial Sequence: Synthetic oligonucleotide
ctcccaaagtgtcgggatta

SEQ ID NO: 8261 - DNA, 20 bp, Artificial Sequence
  Description of Artificial Sequence: Synthetic oligonucleotide
tcccaaagtgtcgggattac

SEQ ID NO: 8262 - DNA, 20 bp, Artificial Sequence
  Description of Artificial Sequence: Synthetic oligonucleotide
cccaaagtgtcgggattaca

SEQ ID NO: 8263 - DNA, 20 bp, Artificial Sequence
  Description of Artificial Sequence: Synthetic oligonucleotide
ccaaagtgtcgggattacag

SEQ ID NO: 8264 - DNA, 20 bp, Artificial Sequence
  Description of Artificial Sequence: Synthetic oligonucleotide
caaagtgtcgggattacaga

SEQ ID NO: 8265 - DNA, 20 bp, Artificial Sequence
  Description of Artificial Sequence: Synthetic oligonucleotide
aaagtgtcgggattacagat

SEQ ID NO: 8266 - DNA, 20 bp, Artificial Sequence
  Description of Artificial Sequence: Synthetic oligonucleotide
aagtgtcgggattacagata

SEQ ID NO: 8267 - DNA, 20 bp, Artificial Sequence
  Description of Artificial Sequence: Synthetic oligonucleotide
agtgtcgggattacagatat

SEQ ID NO: 8268 - DNA, 20 bp, Artificial Sequence
  Description of Artificial Sequence: Synthetic oligonucleotide
gtgtcgggattacagatatg

SEQ ID NO: 8269 - DNA, 20 bp, Artificial Sequence
  Description of Artificial Sequence: Synthetic oligonucleotide
tgtcgggattacagatatga

SEQ ID NO: 8270 - DNA, 20 bp, Artificial Sequence
  Description of Artificial Sequence: Synthetic oligonucleotide
gtcgggattacagatatgag

SEQ ID NO: 8271 - DNA, 20 bp, Artificial Sequence
  Description of Artificial Sequence: Synthetic oligonucleotide
tcgggattacagatatgagc

SEQ ID NO: 8272 - DNA, 20 bp, Artificial Sequence
  Description of Artificial Sequence: Synthetic oligonucleotide
cgggattacagatatgagcc

SEQ ID NO: 8273 - DNA, 20 bp, Artificial Sequence
  Description of Artificial Sequence: Synthetic oligonucleotide
gggattacagatatgagcca

SEQ ID NO: 8274 - DNA, 20 bp, Artificial Sequence
  Description of Artificial Sequence: Synthetic oligonucleotide
ggattacagatatgagccac

SEQ ID NO: 8275 - DNA, 20 bp, Artificial Sequence
  Description of Artificial Sequence: Synthetic oligonucleotide
gattacagatatgagccact

SEQ ID NO: 8276 - DNA, 20 bp, Artificial Sequence
  Description of Artificial Sequence: Synthetic oligonucleotide
attacagatatgagccacta

SEQ ID NO: 8277 - DNA, 20 bp, Artificial Sequence
  Description of Artificial Sequence: Synthetic oligonucleotide
ttacagatatgagccactac

SEQ ID NO: 8278 - DNA, 20 bp, Artificial Sequence
  Description of Artificial Sequence: Synthetic oligonucleotide
tacagatatgagccactaca

SEQ ID NO: 8279 - DNA, 20 bp, Artificial Sequence
  Description of Artificial Sequence: Synthetic oligonucleotide
acagatatgagccactacac

SEQ ID NO: 8280 - DNA, 20 bp, Artificial Sequence
  Description of Artificial Sequence: Synthetic oligonucleotide
cagatatgagccactacacc

SEQ ID NO: 8281 - DNA, 20 bp, Artificial Sequence
  Description of Artificial Sequence: Synthetic oligonucleotide
agatatgagccactacaccc

SEQ ID NO: 8282 - DNA, 20 bp, Artificial Sequence
  Description of Artificial Sequence: Synthetic oligonucleotide
gatatgagccactacaccca

SEQ ID NO: 8283 - DNA, 20 bp, Artificial Sequence
  Description of Artificial Sequence: Synthetic oligonucleotide
atatgagccactacacccag

SEQ ID NO: 8284 - DNA, 20 bp, Artificial Sequence
  Description of Artificial Sequence: Synthetic oligonucleotide
tatgagccactacacccaga

SEQ ID NO: 8285 - DNA, 20 bp, Artificial Sequence
  Description of Artificial Sequence: Synthetic oligonucleotide
atgagccactacacccagac

SEQ ID NO: 8286 - DNA, 20 bp, Artificial Sequence
  Description of Artificial Sequence: Synthetic oligonucleotide
tgagccactacacccagaca

SEQ ID NO: 8287 - DNA, 20 bp, Artificial Sequence
  Description of Artificial Sequence: Synthetic oligonucleotide
gagccactacacccagacaa

SEQ ID NO: 8288 - DNA, 20 bp, Artificial Sequence
  Description of Artificial Sequence: Synthetic oligonucleotide
agccactacacccagacaag

SEQ ID NO: 8289 - DNA, 20 bp, Artificial Sequence
  Description of Artificial Sequence: Synthetic oligonucleotide
gccactacacccagacaagg

SEQ ID NO: 8290 - DNA, 20 bp, Artificial Sequence
  Description of Artificial Sequence: Synthetic oligonucleotide
ccactacacccagacaaggg

SEQ ID NO: 8291 - DNA, 20 bp, Artificial Sequence
  Description of Artificial Sequence: Synthetic oligonucleotide
cactacacccagacaagggc

SEQ ID NO: 8292 - DNA, 20 bp, Artificial Sequence
  Description of Artificial Sequence: Synthetic oligonucleotide
actacacccagacaagggct

SEQ ID NO: 8293 - DNA, 20 bp, Artificial Sequence
  Description of Artificial Sequence: Synthetic oligonucleotide
ctacacccagacaagggctg

SEQ ID NO: 8294 - DNA, 20 bp, Artificial Sequence
  Description of Artificial Sequence: Synthetic oligonucleotide
tacacccagacaagggctgc

SEQ ID NO: 8295 - DNA, 20 bp, Artificial Sequence
  Description of Artificial Sequence: Synthetic oligonucleotide
acacccagacaagggctgca

SEQ ID NO: 8296 - DNA, 20 bp, Artificial Sequence
  Description of Artificial Sequence: Synthetic oligonucleotide
cacccagacaagggctgcat

SEQ ID NO: 8297 - DNA, 20 bp, Artificial Sequence
  Description of Artificial Sequence: Synthetic oligonucleotide
acccagacaagggctgcatt

SEQ ID NO: 8298 - DNA, 20 bp, Artificial Sequence
  Description of Artificial Sequence: Synthetic oligonucleotide
cccagacaagggctgcattt

SEQ ID NO: 8299 - DNA, 20 bp, Artificial Sequence
  Description of Artificial Sequence: Synthetic oligonucleotide
ccagacaagggctgcatttt

SEQ ID NO: 8300 - DNA, 20 bp, Artificial Sequence
  Description of Artificial Sequence: Synthetic oligonucleotide
cagacaagggctgcatttta

SEQ ID NO: 8301 - DNA, 20 bp, Artificial Sequence
  Description of Artificial Sequence: Synthetic oligonucleotide
agacaagggctgcattttaa

SEQ ID NO: 8302 - DNA, 20 bp, Artificial Sequence
  Description of Artificial Sequence: Synthetic oligonucleotide
gacaagggctgcattttaaa

SEQ ID NO: 8303 - DNA, 20 bp, Artificial Sequence
  Description of Artificial Sequence: Synthetic oligonucleotide
acaagggctgcattttaaag

SEQ ID NO: 8304 - DNA, 20 bp, Artificial Sequence
  Description of Artificial Sequence: Synthetic oligonucleotide
caagggctgcattttaaaga

SEQ ID NO: 8305 - DNA, 20 bp, Artificial Sequence
  Description of Artificial Sequence: Synthetic oligonucleotide
aagggctgcattttaaagaa

SEQ ID NO: 8306 - DNA, 20 bp, Artificial Sequence
  Description of Artificial Sequence: Synthetic oligonucleotide
agggctgcattttaaagaaa

SEQ ID NO: 8307 - DNA, 20 bp, Artificial Sequence
  Description of Artificial Sequence: Synthetic oligonucleotide
gggctgcattttaaagaaaa

SEQ ID NO: 8308 - DNA, 20 bp, Artificial Sequence
  Description of Artificial Sequence: Synthetic oligonucleotide
ggctgcattttaaagaaaag

SEQ ID NO: 8309 - DNA, 20 bp, Artificial Sequence
  Description of Artificial Sequence: Synthetic oligonucleotide
gctgcattttaaagaaaaga

SEQ ID NO: 8310 - DNA, 20 bp, Artificial Sequence
  Description of Artificial Sequence: Synthetic oligonucleotide
ctgcattttaaagaaaagag

SEQ ID NO: 8311 - DNA, 20 bp, Artificial Sequence
  Description of Artificial Sequence: Synthetic oligonucleotide
tgcattttaaagaaaagagg

SEQ ID NO: 8312 - DNA, 20 bp, Artificial Sequence
  Description of Artificial Sequence: Synthetic oligonucleotide
gcattttaaagaaaagaggc

SEQ ID NO: 8313 - DNA, 20 bp, Artificial Sequence
  Description of Artificial Sequence: Synthetic oligonucleotide
cattttaaagaaaagaggcc

SEQ ID NO: 8314 - DNA, 20 bp, Artificial Sequence
  Description of Artificial Sequence: Synthetic oligonucleotide
attttaaagaaaagaggcca

SEQ ID NO: 8315 - DNA, 20 bp, Artificial Sequence
  Description of Artificial Sequence: Synthetic oligonucleotide
ttttaaagaaaagaggccag

SEQ ID NO: 8316 - DNA, 20 bp, Artificial Sequence
  Description of Artificial Sequence: Synthetic oligonucleotide
tttaaagaaaagaggccagg

SEQ ID NO: 8317 - DNA, 20 bp, Artificial Sequence
  Description of Artificial Sequence: Synthetic oligonucleotide
ttaaagaaaagaggccagga

SEQ ID NO: 8318 - DNA, 20 bp, Artificial Sequence
  Description of Artificial Sequence: Synthetic oligonucleotide
taaagaaaagaggccaggag

SEQ ID NO: 8319 - DNA, 20 bp, Artificial Sequence
  Description of Artificial Sequence: Synthetic oligonucleotide
aaagaaaagaggccaggagc

SEQ ID NO: 8320 - DNA, 20 bp, Artificial Sequence
  Description of Artificial Sequence: Synthetic oligonucleotide
aagaaaagaggccaggagca

SEQ ID NO: 8321 - DNA, 20 bp, Artificial Sequence
  Description of Artificial Sequence: Synthetic oligonucleotide
agaaaagaggccaggagcag

SEQ ID NO: 8322 - DNA, 20 bp, Artificial Sequence
  Description of Artificial Sequence: Synthetic oligonucleotide
gaaaagaggccaggagcagt

SEQ ID NO: 8323 - DNA, 20 bp, Artificial Sequence
  Description of Artificial Sequence: Synthetic oligonucleotide
aaaagaggccaggagcagtg

SEQ ID NO: 8324 - DNA, 20 bp, Artificial Sequence
  Description of Artificial Sequence: Synthetic oligonucleotide
aaagaggccaggagcagtgg

SEQ ID NO: 8325 - DNA, 20 bp, Artificial Sequence
  Description of Artificial Sequence: Synthetic oligonucleotide
aagaggccaggagcagtggc

SEQ ID NO: 8326 - DNA, 20 bp, Artificial Sequence
  Description of Artificial Sequence: Synthetic oligonucleotide
agaggccaggagcagtggct

SEQ ID NO: 8327 - DNA, 20 bp, Artificial Sequence
  Description of Artificial Sequence: Synthetic oligonucleotide
gaggccaggagcagtggcta

SEQ ID NO: 8328 - DNA, 20 bp, Artificial Sequence
  Description of Artificial Sequence: Synthetic oligonucleotide
aggccaggagcagtggctaa

SEQ ID NO: 8329 - DNA, 20 bp, Artificial Sequence
  Description of Artificial Sequence: Synthetic oligonucleotide
ggccaggagcagtggctaat

SEQ ID NO: 8330 - DNA, 20 bp, Artificial Sequence
  Description of Artificial Sequence: Synthetic oligonucleotide
gccaggagcagtggctaatg

SEQ ID NO: 8331 - DNA, 20 bp, Artificial Sequence
  Description of Artificial Sequence: Synthetic oligonucleotide
ccaggagcagtggctaatgc

SEQ ID NO: 8332 - DNA, 20 bp, Artificial Sequence
  Description of Artificial Sequence: Synthetic oligonucleotide
caggagcagtggctaatgcc

SEQ ID NO: 8333 - DNA, 20 bp, Artificial Sequence
  Description of Artificial Sequence: Synthetic oligonucleotide
aggagcagtggctaatgcct

SEQ ID NO: 8334 - DNA, 20 bp, Artificial Sequence
  Description of Artificial Sequence: Synthetic oligonucleotide
ggagcagtggctaatgccta

SEQ ID NO: 8335 - DNA, 20 bp, Artificial Sequence
  Description of Artificial Sequence: Synthetic oligonucleotide
gagcagtggctaatgcctat

SEQ ID NO: 8336 - DNA, 20 bp, Artificial Sequence
  Description of Artificial Sequence: Synthetic oligonucleotide
agcagtggctaatgcctata

SEQ ID NO: 8337 - DNA, 20 bp, Artificial Sequence
  Description of Artificial Sequence: Synthetic oligonucleotide
gcagtggctaatgcctataa

SEQ ID NO: 8338 - DNA, 20 bp, Artificial Sequence
  Description of Artificial Sequence: Synthetic oligonucleotide
cagtggctaatgcctataat

SEQ ID NO: 8339 - DNA, 20 bp, Artificial Sequence
  Description of Artificial Sequence: Synthetic oligonucleotide
agtggctaatgcctataatc

SEQ ID NO: 8340 - DNA, 20 bp, Artificial Sequence
  Description of Artificial Sequence: Synthetic oligonucleotide
gtggctaatgcctataatcc

SEQ ID NO: 8341 - DNA, 20 bp, Artificial Sequence
  Description of Artificial Sequence: Synthetic oligonucleotide
tggctaatgcctataatccc

SEQ ID NO: 8342 - DNA, 20 bp, Artificial Sequence
  Description of Artificial Sequence: Synthetic oligonucleotide
ggctaatgcctataatccca

SEQ ID NO: 8343 - DNA, 20 bp, Artificial Sequence
  Description of Artificial Sequence: Synthetic oligonucleotide
gctaatgcctataatcccag

SEQ ID NO: 8344 - DNA, 20 bp, Artificial Sequence
  Description of Artificial Sequence: Synthetic oligonucleotide
ctaatgcctataatcccagc

SEQ ID NO: 8345 - DNA, 20 bp, Artificial Sequence
  Description of Artificial Sequence: Synthetic oligonucleotide
taatgcctataatcccagca

SEQ ID NO: 8346 - DNA, 20 bp, Artificial Sequence
  Description of Artificial Sequence: Synthetic oligonucleotide
aatgcctataatcccagcat

SEQ ID NO: 8347 - DNA, 20 bp, Artificial Sequence
  Description of Artificial Sequence: Synthetic oligonucleotide
atgcctataatcccagcatt

SEQ ID NO: 8348 - DNA, 20 bp, Artificial Sequence
  Description of Artificial Sequence: Synthetic oligonucleotide
tgcctataatcccagcattt

SEQ ID NO: 8349 - DNA, 20 bp, Artificial Sequence
  Description of Artificial Sequence: Synthetic oligonucleotide
gcctataatcccagcatttt

SEQ ID NO: 8350 - DNA, 20 bp, Artificial Sequence
  Description of Artificial Sequence: Synthetic oligonucleotide
cctataatcccagcattttg

SEQ ID NO: 8351 - DNA, 20 bp, Artificial Sequence
  Description of Artificial Sequence: Synthetic oligonucleotide
ctataatcccagcattttgg

SEQ ID NO: 8352 - DNA, 20 bp, Artificial Sequence
  Description of Artificial Sequence: Synthetic oligonucleotide
tataatcccagcattttggg

SEQ ID NO: 8353 - DNA, 20 bp, Artificial Sequence
  Description of Artificial Sequence: Synthetic oligonucleotide
ataatcccagcattttggga

SEQ ID NO: 8354 - DNA, 20 bp, Artificial Sequence
  Description of Artificial Sequence: Synthetic oligonucleotide
taatcccagcattttgggag

SEQ ID NO: 8355 - DNA, 20 bp, Artificial Sequence
  Description of Artificial Sequence: Synthetic oligonucleotide
aatcccagcattttgggagg

SEQ ID NO: 8356 - DNA, 20 bp, Artificial Sequence
  Description of Artificial Sequence: Synthetic oligonucleotide
atcccagcattttgggaggc

SEQ ID NO: 8357 - DNA, 20 bp, Artificial Sequence
  Description of Artificial Sequence: Synthetic oligonucleotide
tcccagcattttgggaggcc

SEQ ID NO: 8358 - DNA, 20 bp, Artificial Sequence
  Description of Artificial Sequence: Synthetic oligonucleotide
cccagcattttgggaggcca

SEQ ID NO: 8359 - DNA, 20 bp, Artificial Sequence
  Description of Artificial Sequence: Synthetic oligonucleotide
ccagcattttgggaggccaa

SEQ ID NO: 8360 - DNA, 20 bp, Artificial Sequence
  Description of Artificial Sequence: Synthetic oligonucleotide
cagcattttgggaggccaaa

SEQ ID NO: 8361 - DNA, 20 bp, Artificial Sequence
  Description of Artificial Sequence: Synthetic oligonucleotide
agcattttgggaggccaaag

SEQ ID NO: 8362 - DNA, 20 bp, Artificial Sequence
  Description of Artificial Sequence: Synthetic oligonucleotide
gcattttgggaggccaaagt

SEQ ID NO: 8363 - DNA, 20 bp, Artificial Sequence
  Description of Artificial Sequence: Synthetic oligonucleotide
cattttgggaggccaaagtc

SEQ ID NO: 8364 - DNA, 20 bp, Artificial Sequence
  Description of Artificial Sequence: Synthetic oligonucleotide
attttgggaggccaaagtcg

SEQ ID NO: 8365 - DNA, 20 bp, Artificial Sequence
  Description of Artificial Sequence: Synthetic oligonucleotide
ttttgggaggccaaagtcgg

SEQ ID NO: 8366 - DNA, 20 bp, Artificial Sequence
  Description of Artificial Sequence: Synthetic oligonucleotide
tttgggaggccaaagtcggc

SEQ ID NO: 8367 - DNA, 20 bp, Artificial Sequence
  Description of Artificial Sequence: Synthetic oligonucleotide
ttgggaggccaaagtcggca

SEQ ID NO: 8368 - DNA, 20 bp, Artificial Sequence
  Description of Artificial Sequence: Synthetic oligonucleotide
tgggaggccaaagtcggcaa

SEQ ID NO: 8369 - DNA, 20 bp, Artificial Sequence
  Description of Artificial Sequence: Synthetic oligonucleotide
gggaggccaaagtcggcaaa

SEQ ID NO: 8370 - DNA, 20 bp, Artificial Sequence
  Description of Artificial Sequence: Synthetic oligonucleotide
ggaggccaaagtcggcaaat

SEQ ID NO: 8371 - DNA, 20 bp, Artificial Sequence
  Description of Artificial Sequence: Synthetic oligonucleotide
gaggccaaagtcggcaaatc

SEQ ID NO: 8372 - DNA, 20 bp, Artificial Sequence
  Description of Artificial Sequence: Synthetic oligonucleotide
aggccaaagtcggcaaatca

SEQ ID NO: 8373 - DNA, 20 bp, Artificial Sequence
  Description of Artificial Sequence: Synthetic oligonucleotide
ggccaaagtcggcaaatcat

SEQ ID NO: 8374 - DNA, 20 bp, Artificial Sequence
  Description of Artificial Sequence: Synthetic oligonucleotide
gccaaagtcggcaaatcatt

SEQ ID NO: 8375 - DNA, 20 bp, Artificial Sequence
  Description of Artificial Sequence: Synthetic oligonucleotide
ccaaagtcggcaaatcattt

SEQ ID NO: 8376 - DNA, 20 bp, Artificial Sequence
  Description of Artificial Sequence: Synthetic oligonucleotide
caaagtcggcaaatcatttg

SEQ ID NO: 8377 - DNA, 20 bp, Artificial Sequence
  Description of Artificial Sequence: Synthetic oligonucleotide
aaagtcggcaaatcatttga

SEQ ID NO: 8378 - DNA, 20 bp, Artificial Sequence
  Description of Artificial Sequence: Synthetic oligonucleotide
aagtcggcaaatcatttgag

SEQ ID NO: 8379 - DNA, 20 bp, Artificial Sequence
  Description of Artificial Sequence: Synthetic oligonucleotide
agtcggcaaatcatttgagg

SEQ ID NO: 8380 - DNA, 20 bp, Artificial Sequence
  Description of Artificial Sequence: Synthetic oligonucleotide
gtcggcaaatcatttgaggt

SEQ ID NO: 8381 - DNA, 20 bp, Artificial Sequence
  Description of Artificial Sequence: Synthetic oligonucleotide
tcggcaaatcatttgaggtc

SEQ ID NO: 8382 - DNA, 20 bp, Artificial Sequence
  Description of Artificial Sequence: Synthetic oligonucleotide
cggcaaatcatttgaggtca

SEQ ID NO: 8383 - DNA, 20 bp, Artificial Sequence
  Description of Artificial Sequence: Synthetic oligonucleotide
ggcaaatcatttgaggtcag

SEQ ID NO: 8384 - DNA, 20 bp, Artificial Sequence
  Description of Artificial Sequence: Synthetic oligonucleotide
gcaaatcatttgaggtcagg

SEQ ID NO: 8385 - DNA, 20 bp, Artificial Sequence
  Description of Artificial Sequence: Synthetic oligonucleotide
caaatcatttgaggtcagga

SEQ ID NO: 8386 - DNA, 20 bp, Artificial Sequence
  Description of Artificial Sequence: Synthetic oligonucleotide
aaatcatttgaggtcaggag

SEQ ID NO: 8387 - DNA, 20 bp, Artificial Sequence
  Description of Artificial Sequence: Synthetic oligonucleotide
aatcatttgaggtcaggagt

SEQ ID NO: 8388 - DNA, 20 bp, Artificial Sequence
  Description of Artificial Sequence: Synthetic oligonucleotide
atcatttgaggtcaggagtt

SEQ ID NO: 8389 - DNA, 20 bp, Artificial Sequence
  Description of Artificial Sequence: Synthetic oligonucleotide
tcatttgaggtcaggagttt

SEQ ID NO: 8390 - DNA, 20 bp, Artificial Sequence
  Description of Artificial Sequence: Synthetic oligonucleotide
catttgaggtcaggagtttg

SEQ ID NO: 8391 - DNA, 20 bp, Artificial Sequence
  Description of Artificial Sequence: Synthetic oligonucleotide
atttgaggtcaggagtttga

SEQ ID NO: 8392 - DNA, 20 bp, Artificial Sequence
  Description of Artificial Sequence: Synthetic oligonucleotide
tttgaggtcaggagtttgag

SEQ ID NO: 8393 - DNA, 20 bp, Artificial Sequence
  Description of Artificial Sequence: Synthetic oligonucleotide
ttgaggtcaggagtttgaga

SEQ ID NO: 8394 - DNA, 20 bp, Artificial Sequence
  Description of Artificial Sequence: Synthetic oligonucleotide
tgaggtcaggagtttgagac

SEQ ID NO: 8395 - DNA, 20 bp, Artificial Sequence
  Description of Artificial Sequence: Synthetic oligonucleotide
gaggtcaggagtttgagacc

SEQ ID NO: 8396 - DNA, 20 bp, Artificial Sequence
  Description of Artificial Sequence: Synthetic oligonucleotide
aggtcaggagtttgagacca

SEQ ID NO: 8397 - DNA, 20 bp, Artificial Sequence
  Description of Artificial Sequence: Synthetic oligonucleotide
ggtcaggagtttgagaccag

SEQ ID NO: 8398 - DNA, 20 bp, Artificial Sequence
  Description of Artificial Sequence: Synthetic oligonucleotide
gtcaggagtttgagaccagc

SEQ ID NO: 8399 - DNA, 20 bp, Artificial Sequence
  Description of Artificial Sequence: Synthetic oligonucleotide
tcaggagtttgagaccagcc

SEQ ID NO: 8400 - DNA, 20 bp, Artificial Sequence
  Description of Artificial Sequence: Synthetic oligonucleotide
caggagtttgagaccagcca

SEQ ID NO: 8401 - DNA, 20 bp, Artificial Sequence
  Description of Artificial Sequence: Synthetic oligonucleotide
aggagtttgagaccagccag

SEQ ID NO: 8402 - DNA, 20 bp, Artificial Sequence
  Description of Artificial Sequence: Synthetic oligonucleotide
ggagtttgagaccagccaga

SEQ ID NO: 8403 - DNA, 20 bp, Artificial Sequence
  Description of Artificial Sequence: Synthetic oligonucleotide
gagtttgagaccagccagac

SEQ ID NO: 8404 - DNA, 20 bp, Artificial Sequence
  Description of Artificial Sequence: Synthetic oligonucleotide
agtttgagaccagccagacc

SEQ ID NO: 8405 - DNA, 20 bp, Artificial Sequence
  Description of Artificial Sequence: Synthetic oligonucleotide
gtttgagaccagccagacca

SEQ ID NO: 8406 - DNA, 20 bp, Artificial Sequence
  Description of Artificial Sequence: Synthetic oligonucleotide
tttgagaccagccagaccaa

SEQ ID NO: 8407 - DNA, 20 bp, Artificial Sequence
  Description of Artificial Sequence: Synthetic oligonucleotide
ttgagaccagccagaccaac

SEQ ID NO: 8408 - DNA, 20 bp, Artificial Sequence
  Description of Artificial Sequence: Synthetic oligonucleotide
tgagaccagccagaccaaca

SEQ ID NO: 8409 - DNA, 20 bp, Artificial Sequence
  Description of Artificial Sequence: Synthetic oligonucleotide
gagaccagccagaccaacat

SEQ ID NO: 8410 - DNA, 20 bp, Artificial Sequence
  Description of Artificial Sequence: Synthetic oligonucleotide
agaccagccagaccaacatg

SEQ ID NO: 8411 - DNA, 20 bp, Artificial Sequence
  Description of Artificial Sequence: Synthetic oligonucleotide
gaccagccagaccaacatgg

SEQ ID NO: 8412 - DNA, 20 bp, Artificial Sequence
  Description of Artificial Sequence: Synthetic oligonucleotide
accagccagaccaacatggt

SEQ ID NO: 8413 - DNA, 20 bp, Artificial Sequence
  Description of Artificial Sequence: Synthetic oligonucleotide
ccagccagaccaacatggtg

SEQ ID NO: 8414 - DNA, 20 bp, Artificial Sequence
  Description of Artificial Sequence: Synthetic oligonucleotide
cagccagaccaacatggtga

SEQ ID NO: 8415 - DNA, 20 bp, Artificial Sequence
  Description of Artificial Sequence: Synthetic oligonucleotide
agccagaccaacatggtgaa

SEQ ID NO: 8416 - DNA, 20 bp, Artificial Sequence
  Description of Artificial Sequence: Synthetic oligonucleotide
gccagaccaacatggtgaaa

SEQ ID NO: 8417 - DNA, 20 bp, Artificial Sequence
  Description of Artificial Sequence: Synthetic oligonucleotide
ccagaccaacatggtgaaac

SEQ ID NO: 8418 - DNA, 20 bp, Artificial Sequence
  Description of Artificial Sequence: Synthetic oligonucleotide
cagaccaacatggtgaaacc

SEQ ID NO: 8419 - DNA, 20 bp, Artificial Sequence
  Description of Artificial Sequence: Synthetic oligonucleotide
agaccaacatggtgaaaccc

SEQ ID NO: 8420 - DNA, 20 bp, Artificial Sequence
  Description of Artificial Sequence: Synthetic oligonucleotide
gaccaacatggtgaaaccca

SEQ ID NO: 8421 - DNA, 20 bp, Artificial Sequence
  Description of Artificial Sequence: Synthetic oligonucleotide
accaacatggtgaaacccag

SEQ ID NO: 8422 - DNA, 20 bp, Artificial Sequence
  Description of Artificial Sequence: Synthetic oligonucleotide
ccaacatggtgaaacccagt

SEQ ID NO: 8423 - DNA, 20 bp, Artificial Sequence
  Description of Artificial Sequence: Synthetic oligonucleotide
caacatggtgaaacccagtc

SEQ ID NO: 8424 - DNA, 20 bp, Artificial Sequence
  Description of Artificial Sequence: Synthetic oligonucleotide
aacatggtgaaacccagtct

SEQ ID NO: 8425 - DNA, 20 bp, Artificial Sequence
  Description of Artificial Sequence: Synthetic oligonucleotide
acatggtgaaacccagtctc

SEQ ID NO: 8426 - DNA, 20 bp, Artificial Sequence
  Description of Artificial Sequence: Synthetic oligonucleotide
catggtgaaacccagtctct

SEQ ID NO: 8427 - DNA, 20 bp, Artificial Sequence
  Description of Artificial Sequence: Synthetic oligonucleotide
atggtgaaacccagtctcta

SEQ ID NO: 8428 - DNA, 20 bp, Artificial Sequence
  Description of Artificial Sequence: Synthetic oligonucleotide
tggtgaaacccagtctctac

SEQ ID NO: 8429 - DNA, 20 bp, Artificial Sequence
  Description of Artificial Sequence: Synthetic oligonucleotide
ggtgaaacccagtctctact

SEQ ID NO: 8430 - DNA, 20 bp, Artificial Sequence
  Description of Artificial Sequence: Synthetic oligonucleotide
gtgaaacccagtctctacta

SEQ ID NO: 8431 - DNA, 20 bp, Artificial Sequence
  Description of Artificial Sequence: Synthetic oligonucleotide
tgaaacccagtctctactaa

SEQ ID NO: 8432 - DNA, 20 bp, Artificial Sequence
  Description of Artificial Sequence: Synthetic oligonucleotide
gaaacccagtctctactaaa

SEQ ID NO: 8433 - DNA, 20 bp, Artificial Sequence
  Description of Artificial Sequence: Synthetic oligonucleotide
aaacccagtctctactaaaa

SEQ ID NO: 8434 - DNA, 20 bp, Artificial Sequence
  Description of Artificial Sequence: Synthetic oligonucleotide
aacccagtctctactaaaaa

SEQ ID NO: 8435 - DNA, 20 bp, Artificial Sequence
  Description of Artificial Sequence: Synthetic oligonucleotide
acccagtctctactaaaaat

SEQ ID NO: 8436 - DNA, 20 bp, Artificial Sequence
  Description of Artificial Sequence: Synthetic oligonucleotide
cccagtctctactaaaaata

SEQ ID NO: 8437 - DNA, 20 bp, Artificial Sequence
  Description of Artificial Sequence: Synthetic oligonucleotide
ccagtctctactaaaaatac

SEQ ID NO: 8438 - DNA, 20 bp, Artificial Sequence
  Description of Artificial Sequence: Synthetic oligonucleotide
cagtctctactaaaaataca

SEQ ID NO: 8439 - DNA, 20 bp, Artificial Sequence
  Description of Artificial Sequence: Synthetic oligonucleotide
agtctctactaaaaatacaa

SEQ ID NO: 8440 - DNA, 20 bp, Artificial Sequence
  Description of Artificial Sequence: Synthetic oligonucleotide
gtctctactaaaaatacaaa

SEQ ID NO: 8441 - DNA, 20 bp, Artificial Sequence
  Description of Artificial Sequence: Synthetic oligonucleotide
tctctactaaaaatacaaaa

SEQ ID NO: 8442 - DNA, 20 bp, Artificial Sequence
  Description of Artificial Sequence: Synthetic oligonucleotide
ctctactaaaaatacaaaaa

SEQ ID NO: 8443 - DNA, 20 bp, Artificial Sequence
  Description of Artificial Sequence: Synthetic oligonucleotide
tctactaaaaatacaaaaat

SEQ ID NO: 8444 - DNA, 20 bp, Artificial Sequence
  Description of Artificial Sequence: Synthetic oligonucleotide
ctactaaaaatacaaaaatt

SEQ ID NO: 8445 - DNA, 20 bp, Artificial Sequence
  Description of Artificial Sequence: Synthetic oligonucleotide
tactaaaaatacaaaaatta

SEQ ID NO: 8446 - DNA, 20 bp, Artificial Sequence
  Description of Artificial Sequence: Synthetic oligonucleotide
actaaaaatacaaaaattag

SEQ ID NO: 8447 - DNA, 20 bp, Artificial Sequence
  Description of Artificial Sequence: Synthetic oligonucleotide
ctaaaaatacaaaaattagc

SEQ ID NO: 8448 - DNA, 20 bp, Artificial Sequence
  Description of Artificial Sequence: Synthetic oligonucleotide
taaaaatacaaaaattagct

SEQ ID NO: 8449 - DNA, 20 bp, Artificial Sequence
  Description of Artificial Sequence: Synthetic oligonucleotide
aaaaatacaaaaattagctg

SEQ ID NO: 8450 - DNA, 20 bp, Artificial Sequence
  Description of Artificial Sequence: Synthetic oligonucleotide
aaaatacaaaaattagctgg

SEQ ID NO: 8451 - DNA, 20 bp, Artificial Sequence
  Description of Artificial Sequence: Synthetic oligonucleotide
aaatacaaaaattagctggg

SEQ ID NO: 8452 - DNA, 20 bp, Artificial Sequence
  Description of Artificial Sequence: Synthetic oligonucleotide
aatacaaaaattagctgggt

SEQ ID NO: 8453 - DNA, 20 bp, Artificial Sequence
  Description of Artificial Sequence: Synthetic oligonucleotide
atacaaaaattagctgggtg

SEQ ID NO: 8454 - DNA, 20 bp, Artificial Sequence
  Description of Artificial Sequence: Synthetic oligonucleotide
tacaaaaattagctgggtgt

SEQ ID NO: 8455 - DNA, 20 bp, Artificial Sequence
  Description of Artificial Sequence: Synthetic oligonucleotide
acaaaaattagctgggtgtg

SEQ ID NO: 8456 - DNA, 20 bp, Artificial Sequence
  Description of Artificial Sequence: Synthetic oligonucleotide
caaaaattagctgggtgtgg

SEQ ID NO: 8457 - DNA, 20 bp, Artificial Sequence
  Description of Artificial Sequence: Synthetic oligonucleotide
aaaaattagctgggtgtggt

SEQ ID NO: 8458 - DNA, 20 bp, Artificial Sequence
  Description of Artificial Sequence: Synthetic oligonucleotide
aaaattagctgggtgtggtt

SEQ ID NO: 8459 - DNA, 20 bp, Artificial Sequence
  Description of Artificial Sequence: Synthetic oligonucleotide
aaattagctgggtgtggttg

SEQ ID NO: 8460 - DNA, 20 bp, Artificial Sequence
  Description of Artificial Sequence: Synthetic oligonucleotide
aattagctgggtgtggttgc

SEQ ID NO: 8461 - DNA, 20 bp, Artificial Sequence
  Description of Artificial Sequence: Synthetic oligonucleotide
attagctgggtgtggttgct

SEQ ID NO: 8462 - DNA, 20 bp, Artificial Sequence
  Description of Artificial Sequence: Synthetic oligonucleotide
ttagctgggtgtggttgctc

SEQ ID NO: 8463 - DNA, 20 bp, Artificial Sequence
  Description of Artificial Sequence: Synthetic oligonucleotide
tagctgggtgtggttgctcg

SEQ ID NO: 8464 - DNA, 20 bp, Artificial Sequence
  Description of Artificial Sequence: Synthetic oligonucleotide
agctgggtgtggttgctcgc

SEQ ID NO: 8465 - DNA, 20 bp, Artificial Sequence
  Description of Artificial Sequence: Synthetic oligonucleotide
gctgggtgtggttgctcgca

SEQ ID NO: 8466 - DNA, 20 bp, Artificial Sequence
  Description of Artificial Sequence: Synthetic oligonucleotide
ctgggtgtggttgctcgcac

SEQ ID NO: 8467 - DNA, 20 bp, Artificial Sequence
  Description of Artificial Sequence: Synthetic oligonucleotide
tgggtgtggttgctcgcacc

SEQ ID NO: 8468 - DNA, 20 bp, Artificial Sequence
  Description of Artificial Sequence: Synthetic oligonucleotide
gggtgtggttgctcgcacct

SEQ ID NO: 8469 - DNA, 20 bp, Artificial Sequence
  Description of Artificial Sequence: Synthetic oligonucleotide
ggtgtggttgctcgcacctg

SEQ ID NO: 8470 - DNA, 20 bp, Artificial Sequence
  Description of Artificial Sequence: Synthetic oligonucleotide
gtgtggttgctcgcacctgt

SEQ ID NO: 8471 - DNA, 20 bp, Artificial Sequence
  Description of Artificial Sequence: Synthetic oligonucleotide
tgtggttgctcgcacctgta

SEQ ID NO: 8472 - DNA, 20 bp, Artificial Sequence
  Description of Artificial Sequence: Synthetic oligonucleotide
gtggttgctcgcacctgtag

SEQ ID NO: 8473 - DNA, 20 bp, Artificial Sequence
  Description of Artificial Sequence: Synthetic oligonucleotide
tggttgctcgcacctgtagt

SEQ ID NO: 8474 - DNA, 20 bp, Artificial Sequence
  Description of Artificial Sequence: Synthetic oligonucleotide
ggttgctcgcacctgtagtc

SEQ ID NO: 8475 - DNA, 20 bp, Artificial Sequence
  Description of Artificial Sequence: Synthetic oligonucleotide
gttgctcgcacctgtagtct

SEQ ID NO: 8476 - DNA, 20 bp, Artificial Sequence
  Description of Artificial Sequence: Synthetic oligonucleotide
ttgctcgcacctgtagtctc

SEQ ID NO: 8477 - DNA, 20 bp, Artificial Sequence
  Description of Artificial Sequence: Synthetic oligonucleotide
tgctcgcacctgtagtctca

SEQ ID NO: 8478 - DNA, 20 bp, Artificial Sequence
  Description of Artificial Sequence: Synthetic oligonucleotide
gctcgcacctgtagtctcag

SEQ ID NO: 8479 - DNA, 20 bp, Artificial Sequence
  Description of Artificial Sequence: Synthetic oligonucleotide
ctcgcacctgtagtctcagc

SEQ ID NO: 8480 - DNA, 20 bp, Artificial Sequence
  Description of Artificial Sequence: Synthetic oligonucleotide
tcgcacctgtagtctcagct

SEQ ID NO: 8481 - DNA, 20 bp, Artificial Sequence
  Description of Artificial Sequence: Synthetic oligonucleotide
cgcacctgtagtctcagcta

SEQ ID NO: 8482 - DNA, 20 bp, Artificial Sequence
  Description of Artificial Sequence: Synthetic oligonucleotide
gcacctgtagtctcagctac

SEQ ID NO: 8483 - DNA, 20 bp, Artificial Sequence
  Description of Artificial Sequence: Synthetic oligonucleotide
cacctgtagtctcagctact

SEQ ID NO: 8484 - DNA, 20 bp, Artificial Sequence
  Description of Artificial Sequence: Synthetic oligonucleotide
acctgtagtctcagctactg

SEQ ID NO: 8485 - DNA, 20 bp, Artificial Sequence
  Description of Artificial Sequence: Synthetic oligonucleotide
cctgtagtctcagctactgg

SEQ ID NO: 8486 - DNA, 20 bp, Artificial Sequence
  Description of Artificial Sequence: Synthetic oligonucleotide
ctgtagtctcagctactggg

SEQ ID NO: 8487 - DNA, 20 bp, Artificial Sequence
  Description of Artificial Sequence: Synthetic oligonucleotide
tgtagtctcagctactgggg

SEQ ID NO: 8488 - DNA, 20 bp, Artificial Sequence
  Description of Artificial Sequence: Synthetic oligonucleotide
gtagtctcagctactgggga

SEQ ID NO: 8489 - DNA, 20 bp, Artificial Sequence
  Description of Artificial Sequence: Synthetic oligonucleotide
tagtctcagctactggggag

SEQ ID NO: 8490 - DNA, 20 bp, Artificial Sequence
  Description of Artificial Sequence: Synthetic oligonucleotide
agtctcagctactggggagg

SEQ ID NO: 8491 - DNA, 20 bp, Artificial Sequence
  Description of Artificial Sequence: Synthetic oligonucleotide
gtctcagctactggggaggc

SEQ ID NO: 8492 - DNA, 20 bp, Artificial Sequence
  Description of Artificial Sequence: Synthetic oligonucleotide
tctcagctactggggaggct

SEQ ID NO: 8493 - DNA, 20 bp, Artificial Sequence
  Description of Artificial Sequence: Synthetic oligonucleotide
ctcagctactggggaggctg

SEQ ID NO: 8494 - DNA, 20 bp, Artificial Sequence
  Description of Artificial Sequence: Synthetic oligonucleotide
tcagctactggggaggctga

SEQ ID NO: 8495 - DNA, 20 bp, Artificial Sequence
  Description of Artificial Sequence: Synthetic oligonucleotide
cagctactggggaggctgac

SEQ ID NO: 8496 - DNA, 20 bp, Artificial Sequence
  Description of Artificial Sequence: Synthetic oligonucleotide
agctactggggaggctgacg

SEQ ID NO: 8497 - DNA, 20 bp, Artificial Sequence
  Description of Artificial Sequence: Synthetic oligonucleotide
gctactggggaggctgacgc

SEQ ID NO: 8498 - DNA, 20 bp, Artificial Sequence
  Description of Artificial Sequence: Synthetic oligonucleotide
ctactggggaggctgacgct

SEQ ID NO: 8499 - DNA, 20 bp, Artificial Sequence
  Description of Artificial Sequence: Synthetic oligonucleotide
tactggggaggctgacgctg

SEQ ID NO: 8500 - DNA, 20 bp, Artificial Sequence
  Description of Artificial Sequence: Synthetic oligonucleotide
actggggaggctgacgctgg

SEQ ID NO: 8501 - DNA, 20 bp, Artificial Sequence
  Description of Artificial Sequence: Synthetic oligonucleotide
ctggggaggctgacgctgga

SEQ ID NO: 8502 - DNA, 20 bp, Artificial Sequence
  Description of Artificial Sequence: Synthetic oligonucleotide
tggggaggctgacgctggag

SEQ ID NO: 8503 - DNA, 20 bp, Artificial Sequence
  Description of Artificial Sequence: Synthetic oligonucleotide
ggggaggctgacgctggaga

SEQ ID NO: 8504 - DNA, 20 bp, Artificial Sequence
  Description of Artificial Sequence: Synthetic oligonucleotide
gggaggctgacgctggagaa

SEQ ID NO: 8505 - DNA, 20 bp, Artificial Sequence
  Description of Artificial Sequence: Synthetic oligonucleotide
ggaggctgacgctggagaat

SEQ ID NO: 8506 - DNA, 20 bp, Artificial Sequence
  Description of Artificial Sequence: Synthetic oligonucleotide
gaggctgacgctggagaatt

SEQ ID NO: 8507 - DNA, 20 bp, Artificial Sequence
  Description of Artificial Sequence: Synthetic oligonucleotide
aggctgacgctggagaattg

SEQ ID NO: 8508 - DNA, 20 bp, Artificial Sequence
  Description of Artificial Sequence: Synthetic oligonucleotide
ggctgacgctggagaattgc

SEQ ID NO: 8509 - DNA, 20 bp, Artificial Sequence
  Description of Artificial Sequence: Synthetic oligonucleotide
gctgacgctggagaattgct

SEQ ID NO: 8510 - DNA, 20 bp, Artificial Sequence
  Description of Artificial Sequence: Synthetic oligonucleotide
ctgacgctggagaattgctt

SEQ ID NO: 8511 - DNA, 20 bp, Artificial Sequence
  Description of Artificial Sequence: Synthetic oligonucleotide
tgacgctggagaattgcttg

SEQ ID NO: 8512 - DNA, 20 bp, Artificial Sequence
  Description of Artificial Sequence: Synthetic oligonucleotide
gacgctggagaattgcttga

SEQ ID NO: 8513 - DNA, 20 bp, Artificial Sequence
  Description of Artificial Sequence: Synthetic oligonucleotide
acgctggagaattgcttgaa

SEQ ID NO: 8514 - DNA, 20 bp, Artificial Sequence
  Description of Artificial Sequence: Synthetic oligonucleotide
cgctggagaattgcttgaac

SEQ ID NO: 8515 - DNA, 20 bp, Artificial Sequence
  Description of Artificial Sequence: Synthetic oligonucleotide
gctggagaattgcttgaacc

SEQ ID NO: 8516 - DNA, 20 bp, Artificial Sequence
  Description of Artificial Sequence: Synthetic oligonucleotide
ctggagaattgcttgaaccc

SEQ ID NO: 8517 - DNA, 20 bp, Artificial Sequence
  Description of Artificial Sequence: Synthetic oligonucleotide
tggagaattgcttgaacccg

SEQ ID NO: 8518 - DNA, 20 bp, Artificial Sequence
  Description of Artificial Sequence: Synthetic oligonucleotide
ggagaattgcttgaacccgg

SEQ ID NO: 8519 - DNA, 20 bp, Artificial Sequence
  Description of Artificial Sequence: Synthetic oligonucleotide
gagaattgcttgaacccggg

SEQ ID NO: 8520 - DNA, 20 bp, Artificial Sequence
  Description of Artificial Sequence: Synthetic oligonucleotide
agaattgcttgaacccggga

SEQ ID NO: 8521 - DNA, 20 bp, Artificial Sequence
  Description of Artificial Sequence: Synthetic oligonucleotide
gaattgcttgaacccgggag

SEQ ID NO: 8522 - DNA, 20 bp, Artificial Sequence
  Description of Artificial Sequence: Synthetic oligonucleotide
aattgcttgaacccgggagg

SEQ ID NO: 8523 - DNA, 20 bp, Artificial Sequence
  Description of Artificial Sequence: Synthetic oligonucleotide
attgcttgaacccgggaggc

SEQ ID NO: 8524 - DNA, 20 bp, Artificial Sequence
  Description of Artificial Sequence: Synthetic oligonucleotide
ttgcttgaacccgggaggcg

SEQ ID NO: 8525 - DNA, 20 bp, Artificial Sequence
  Description of Artificial Sequence: Synthetic oligonucleotide
tgcttgaacccgggaggcgg

SEQ ID NO: 8526 - DNA, 20 bp, Artificial Sequence
  Description of Artificial Sequence: Synthetic oligonucleotide
gcttgaacccgggaggcgga

SEQ ID NO: 8527 - DNA, 20 bp, Artificial Sequence
  Description of Artificial Sequence: Synthetic oligonucleotide
cttgaacccgggaggcggag

SEQ ID NO: 8528 - DNA, 20 bp, Artificial Sequence
  Description of Artificial Sequence: Synthetic oligonucleotide
ttgaacccgggaggcggagg

SEQ ID NO: 8529 - DNA, 20 bp, Artificial Sequence
  Description of Artificial Sequence: Synthetic oligonucleotide
tgaacccgggaggcggaggt

SEQ ID NO: 8530 - DNA, 20 bp, Artificial Sequence
  Description of Artificial Sequence: Synthetic oligonucleotide
gaacccgggaggcggaggtt

SEQ ID NO: 8531 - DNA, 20 bp, Artificial Sequence
  Description of Artificial Sequence: Synthetic oligonucleotide
aacccgggaggcggaggttt

SEQ ID NO: 8532 - DNA, 20 bp, Artificial Sequence
  Description of Artificial Sequence: Synthetic oligonucleotide
acccgggaggcggaggtttc

SEQ ID NO: 8533 - DNA, 20 bp, Artificial Sequence
  Description of Artificial Sequence: Synthetic oligonucleotide
cccgggaggcggaggtttca

SEQ ID NO: 8534 - DNA, 20 bp, Artificial Sequence
  Description of Artificial Sequence: Synthetic oligonucleotide
ccgggaggcggaggtttcag

SEQ ID NO: 8535 - DNA, 20 bp, Artificial Sequence
  Description of Artificial Sequence: Synthetic oligonucleotide
cgggaggcggaggtttcagt

SEQ ID NO: 8536 - DNA, 20 bp, Artificial Sequence
  Description of Artificial Sequence: Synthetic oligonucleotide
gggaggcggaggtttcagtg

SEQ ID NO: 8537 - DNA, 20 bp, Artificial Sequence
  Description of Artificial Sequence: Synthetic oligonucleotide
ggaggcggaggtttcagtga

SEQ ID NO: 8538 - DNA, 20 bp, Artificial Sequence
  Description of Artificial Sequence: Synthetic oligonucleotide
gaggcggaggtttcagtgag

SEQ ID NO: 8539 - DNA, 20 bp, Artificial Sequence
  Description of Artificial Sequence: Synthetic oligonucleotide
aggcggaggtttcagtgagc

SEQ ID NO: 8540 - DNA, 20 bp, Artificial Sequence
  Description of Artificial Sequence: Synthetic oligonucleotide
ggcggaggtttcagtgagct

SEQ ID NO: 8541 - DNA, 20 bp, Artificial Sequence
  Description of Artificial Sequence: Synthetic oligonucleotide
gcggaggtttcagtgagctg

SEQ ID NO: 8542 - DNA, 20 bp, Artificial Sequence
  Description of Artificial Sequence: Synthetic oligonucleotide
cggaggtttcagtgagctga

SEQ ID NO: 8543 - DNA, 20 bp, Artificial Sequence
  Description of Artificial Sequence: Synthetic oligonucleotide
ggaggtttcagtgagctgag

SEQ ID NO: 8544 - DNA, 20 bp, Artificial Sequence
  Description of Artificial Sequence: Synthetic oligonucleotide
gaggtttcagtgagctgaga

SEQ ID NO: 8545 - DNA, 20 bp, Artificial Sequence
  Description of Artificial Sequence: Synthetic oligonucleotide
aggtttcagtgagctgagat

SEQ ID NO: 8546 - DNA, 20 bp, Artificial Sequence
  Description of Artificial Sequence: Synthetic oligonucleotide
ggtttcagtgagctgagatc

SEQ ID NO: 8547 - DNA, 20 bp, Artificial Sequence
  Description of Artificial Sequence: Synthetic oligonucleotide
gtttcagtgagctgagatcg

SEQ ID NO: 8548 - DNA, 20 bp, Artificial Sequence
  Description of Artificial Sequence: Synthetic oligonucleotide
tttcagtgagctgagatcgt

SEQ ID NO: 8549 - DNA, 20 bp, Artificial Sequence
  Description of Artificial Sequence: Synthetic oligonucleotide
ttcagtgagctgagatcgtg

SEQ ID NO: 8550 - DNA, 20 bp, Artificial Sequence
  Description of Artificial Sequence: Synthetic oligonucleotide
tcagtgagctgagatcgtgg

SEQ ID NO: 8551 - DNA, 20 bp, Artificial Sequence
  Description of Artificial Sequence: Synthetic oligonucleotide
cagtgagctgagatcgtggc

SEQ ID NO: 8552 - DNA, 20 bp, Artificial Sequence
  Description of Artificial Sequence: Synthetic oligonucleotide
agtgagctgagatcgtggca

SEQ ID NO: 8553 - DNA, 20 bp, Artificial Sequence
  Description of Artificial Sequence: Synthetic oligonucleotide
gtgagctgagatcgtggcat

SEQ ID NO: 8554 - DNA, 20 bp, Artificial Sequence
  Description of Artificial Sequence: Synthetic oligonucleotide
tgagctgagatcgtggcatt

SEQ ID NO: 8555 - DNA, 20 bp, Artificial Sequence
  Description of Artificial Sequence: Synthetic oligonucleotide
gagctgagatcgtggcattg

SEQ ID NO: 8556 - DNA, 20 bp, Artificial Sequence
  Description of Artificial Sequence: Synthetic oligonucleotide
agctgagatcgtggcattgc

SEQ ID NO: 8557 - DNA, 20 bp, Artificial Sequence
  Description of Artificial Sequence: Synthetic oligonucleotide
gctgagatcgtggcattgca

SEQ ID NO: 8558 - DNA, 20 bp, Artificial Sequence
  Description of Artificial Sequence: Synthetic oligonucleotide
ctgagatcgtggcattgcac

SEQ ID NO: 8559 - DNA, 20 bp, Artificial Sequence
  Description of Artificial Sequence: Synthetic oligonucleotide
tgagatcgtggcattgcact

SEQ ID NO: 8560 - DNA, 20 bp, Artificial Sequence
  Description of Artificial Sequence: Synthetic oligonucleotide
gagatcgtggcattgcactc

SEQ ID NO: 8561 - DNA, 20 bp, Artificial Sequence
  Description of Artificial Sequence: Synthetic oligonucleotide
agatcgtggcattgcactcc

SEQ ID NO: 8562 - DNA, 20 bp, Artificial Sequence
  Description of Artificial Sequence: Synthetic oligonucleotide
gatcgtggcattgcactcca

SEQ ID NO: 8563 - DNA, 20 bp, Artificial Sequence
  Description of Artificial Sequence: Synthetic oligonucleotide
atcgtggcattgcactccag

SEQ ID NO: 8564 - DNA, 20 bp, Artificial Sequence
  Description of Artificial Sequence: Synthetic oligonucleotide
tcgtggcattgcactccagc

SEQ ID NO: 8565 - DNA, 20 bp, Artificial Sequence
  Description of Artificial Sequence: Synthetic oligonucleotide
cgtggcattgcactccagct

SEQ ID NO: 8566 - DNA, 20 bp, Artificial Sequence
  Description of Artificial Sequence: Synthetic oligonucleotide
gtggcattgcactccagctc

SEQ ID NO: 8567 - DNA, 20 bp, Artificial Sequence
  Description of Artificial Sequence: Synthetic oligonucleotide
tggcattgcactccagctcc

SEQ ID NO: 8568 - DNA, 20 bp, Artificial Sequence
  Description of Artificial Sequence: Synthetic oligonucleotide
ggcattgcactccagctcca

SEQ ID NO: 8569 - DNA, 20 bp, Artificial Sequence
  Description of Artificial Sequence: Synthetic oligonucleotide
gcattgcactccagctccaa

SEQ ID NO: 8570 - DNA, 20 bp, Artificial Sequence
  Description of Artificial Sequence: Synthetic oligonucleotide
cattgcactccagctccaag

SEQ ID NO: 8571 - DNA, 20 bp, Artificial Sequence
  Description of Artificial Sequence: Synthetic oligonucleotide
attgcactccagctccaaga

SEQ ID NO: 8572 - DNA, 20 bp, Artificial Sequence
  Description of Artificial Sequence: Synthetic oligonucleotide
ttgcactccagctccaagag

SEQ ID NO: 8573 - DNA, 20 bp, Artificial Sequence
  Description of Artificial Sequence: Synthetic oligonucleotide
tgcactccagctccaagagc

SEQ ID NO: 8574 - DNA, 20 bp, Artificial Sequence
  Description of Artificial Sequence: Synthetic oligonucleotide
gcactccagctccaagagca

SEQ ID NO: 8575 - DNA, 20 bp, Artificial Sequence
  Description of Artificial Sequence: Synthetic oligonucleotide
cactccagctccaagagcaa

SEQ ID NO: 8576 - DNA, 20 bp, Artificial Sequence
  Description of Artificial Sequence: Synthetic oligonucleotide
actccagctccaagagcaaa

SEQ ID NO: 8577 - DNA, 20 bp, Artificial Sequence
  Description of Artificial Sequence: Synthetic oligonucleotide
ctccagctccaagagcaaaa

SEQ ID NO: 8578 - DNA, 20 bp, Artificial Sequence
  Description of Artificial Sequence: Synthetic oligonucleotide
tccagctccaagagcaaaac

SEQ ID NO: 8579 - DNA, 20 bp, Artificial Sequence
  Description of Artificial Sequence: Synthetic oligonucleotide
ccagctccaagagcaaaact

SEQ ID NO: 8580 - DNA, 20 bp, Artificial Sequence
  Description of Artificial Sequence: Synthetic oligonucleotide
cagctccaagagcaaaactc

SEQ ID NO: 8581 - DNA, 20 bp, Artificial Sequence
  Description of Artificial Sequence: Synthetic oligonucleotide
agctccaagagcaaaactcc

SEQ ID NO: 8582 - DNA, 20 bp, Artificial Sequence
  Description of Artificial Sequence: Synthetic oligonucleotide
gctccaagagcaaaactcca

SEQ ID NO: 8583 - DNA, 20 bp, Artificial Sequence
  Description of Artificial Sequence: Synthetic oligonucleotide
ctccaagagcaaaactccat

SEQ ID NO: 8584 - DNA, 20 bp, Artificial Sequence
  Description of Artificial Sequence: Synthetic oligonucleotide
tccaagagcaaaactccatc

SEQ ID NO: 8585 - DNA, 20 bp, Artificial Sequence
  Description of Artificial Sequence: Synthetic oligonucleotide
ccaagagcaaaactccatct

SEQ ID NO: 8586 - DNA, 20 bp, Artificial Sequence
  Description of Artificial Sequence: Synthetic oligonucleotide
caagagcaaaactccatctc

SEQ ID NO: 8587 - DNA, 20 bp, Artificial Sequence
  Description of Artificial Sequence: Synthetic oligonucleotide
aagagcaaaactccatctca

SEQ ID NO: 8588 - DNA, 20 bp, Artificial Sequence
  Description of Artificial Sequence: Synthetic oligonucleotide
agagcaaaactccatctcaa

SEQ ID NO: 8589 - DNA, 20 bp, Artificial Sequence
  Description of Artificial Sequence: Synthetic oligonucleotide
gagcaaaactccatctcaaa

SEQ ID NO: 8590 - DNA, 20 bp, Artificial Sequence
  Description of Artificial Sequence: Synthetic oligonucleotide
agcaaaactccatctcaaaa

SEQ ID NO: 8591 - DNA, 20 bp, Artificial Sequence
  Description of Artificial Sequence: Synthetic oligonucleotide
gcaaaactccatctcaaaaa

SEQ ID NO: 8592 - DNA, 20 bp, Artificial Sequence
  Description of Artificial Sequence: Synthetic oligonucleotide
caaaactccatctcaaaaaa

SEQ ID NO: 8593 - DNA, 20 bp, Artificial Sequence
  Description of Artificial Sequence: Synthetic oligonucleotide
aaaactccatctcaaaaaaa

SEQ ID NO: 8594 - DNA, 20 bp, Artificial Sequence
  Description of Artificial Sequence: Synthetic oligonucleotide
aaactccatctcaaaaaaaa

SEQ ID NO: 8595 - DNA, 20 bp, Artificial Sequence
  Description of Artificial Sequence: Synthetic oligonucleotide
aactccatctcaaaaaaaaa

SEQ ID NO: 8596 - DNA, 20 bp, Artificial Sequence
  Description of Artificial Sequence: Synthetic oligonucleotide
actccatctcaaaaaaaaaa

SEQ ID NO: 8597 - DNA, 20 bp, Artificial Sequence
  Description of Artificial Sequence: Synthetic oligonucleotide
ctccatctcaaaaaaaaaaa

SEQ ID NO: 8598 - DNA, 20 bp, Artificial Sequence
  Description of Artificial Sequence: Synthetic oligonucleotide
tccatctcaaaaaaaaaaaa

SEQ ID NO: 8599 - DNA, 20 bp, Artificial Sequence
  Description of Artificial Sequence: Synthetic oligonucleotide
ccatctcaaaaaaaaaaaaa

SEQ ID NO: 8600 - DNA, 20 bp, Artificial Sequence
  Description of Artificial Sequence: Synthetic oligonucleotide
catctcaaaaaaaaaaaaaa

SEQ ID NO: 8601 - DNA, 20 bp, Artificial Sequence
  Description of Artificial Sequence: Synthetic oligonucleotide
atctcaaaaaaaaaaaaaaa

SEQ ID NO: 8602 - DNA, 20 bp, Artificial Sequence
  Description of Artificial Sequence: Synthetic oligonucleotide
tctcaaaaaaaaaaaaaaaa

SEQ ID NO: 8603 - DNA, 20 bp, Artificial Sequence
  Description of Artificial Sequence: Synthetic oligonucleotide
ctcaaaaaaaaaaaaaaaaa

SEQ ID NO: 8604 - DNA, 20 bp, Artificial Sequence
  Description of Artificial Sequence: Synthetic oligonucleotide
tcaaaaaaaaaaaaaaaaaa

SEQ ID NO: 8605 - DNA, 20 bp, Artificial Sequence
  Description of Artificial Sequence: Synthetic oligonucleotide
caaaaaaaaaaaaaaaaaaa

SEQ ID NO: 8606 - DNA, 20 bp, Artificial Sequence
  Description of Artificial Sequence: Synthetic oligonucleotide
aaaaaaaaaaaaaaaaaaaa

SEQ ID NO: 8607 - DNA, 20 bp, Artificial Sequence
  Description of Artificial Sequence: Synthetic oligonucleotide
aaaaaaaaaaaaaaaaaaaa

SEQ ID NO: 8608 - DNA, 20 bp, Artificial Sequence
  Description of Artificial Sequence: Synthetic oligonucleotide
aaaaaaaaaaaaaaaaaaag

SEQ ID NO: 8609 - DNA, 20 bp, Artificial Sequence
  Description of Artificial Sequence: Synthetic oligonucleotide
aaaaaaaaaaaaaaaaaaga

SEQ ID NO: 8610 - DNA, 20 bp, Artificial Sequence
  Description of Artificial Sequence: Synthetic oligonucleotide
aaaaaaaaaaaaaaaaagac

SEQ ID NO: 8611 - DNA, 20 bp, Artificial Sequence
  Description of Artificial Sequence: Synthetic oligonucleotide
aaaaaaaaaaaaaaaagacc

SEQ ID NO: 8612 - DNA, 20 bp, Artificial Sequence
  Description of Artificial Sequence: Synthetic oligonucleotide
aaaaaaaaaaaaaaagacca

SEQ ID NO: 8613 - DNA, 20 bp, Artificial Sequence
  Description of Artificial Sequence: Synthetic oligonucleotide
aaaaaaaaaaaaaagaccag

SEQ ID NO: 8614 - DNA, 20 bp, Artificial Sequence
  Description of Artificial Sequence: Synthetic oligonucleotide
aaaaaaaaaaaaagaccagc

SEQ ID NO: 8615 - DNA, 20 bp, Artificial Sequence
  Description of Artificial Sequence: Synthetic oligonucleotide
aaaaaaaaaaaagaccagct

SEQ ID NO: 8616 - DNA, 20 bp, Artificial Sequence
  Description of Artificial Sequence: Synthetic oligonucleotide
aaaaaaaaaaagaccagctt

SEQ ID NO: 8617 - DNA, 20 bp, Artificial Sequence
  Description of Artificial Sequence: Synthetic oligonucleotide
aaaaaaaaaagaccagcttg

SEQ ID NO: 8618 - DNA, 20 bp, Artificial Sequence
  Description of Artificial Sequence: Synthetic oligonucleotide
aaaaaaaaagaccagcttgg

SEQ ID NO: 8619 - DNA, 20 bp, Artificial Sequence
  Description of Artificial Sequence: Synthetic oligonucleotide
aaaaaaaagaccagcttggg

SEQ ID NO: 8620 - DNA, 20 bp, Artificial Sequence
  Description of Artificial Sequence: Synthetic oligonucleotide
aaaaaaagaccagcttgggc

SEQ ID NO: 8621 - DNA, 20 bp, Artificial Sequence
  Description of Artificial Sequence: Synthetic oligonucleotide
aaaaaagaccagcttgggca

SEQ ID NO: 8622 - DNA, 20 bp, Artificial Sequence
  Description of Artificial Sequence: Synthetic oligonucleotide
aaaaagaccagcttgggcaa

SEQ ID NO: 8623 - DNA, 20 bp, Artificial Sequence
  Description of Artificial Sequence: Synthetic oligonucleotide
aaaagaccagcttgggcaac

SEQ ID NO: 8624 - DNA, 20 bp, Artificial Sequence
  Description of Artificial Sequence: Synthetic oligonucleotide
aaagaccagcttgggcaaca

SEQ ID NO: 8625 - DNA, 20 bp, Artificial Sequence
  Description of Artificial Sequence: Synthetic oligonucleotide
aagaccagcttgggcaacat

SEQ ID NO: 8626 - DNA, 20 bp, Artificial Sequence
  Description of Artificial Sequence: Synthetic oligonucleotide
agaccagcttgggcaacata

SEQ ID NO: 8627 - DNA, 20 bp, Artificial Sequence
  Description of Artificial Sequence: Synthetic oligonucleotide
gaccagcttgggcaacatag

SEQ ID NO: 8628 - DNA, 20 bp, Artificial Sequence
  Description of Artificial Sequence: Synthetic oligonucleotide
accagcttgggcaacatagc

SEQ ID NO: 8629 - DNA, 20 bp, Artificial Sequence
  Description of Artificial Sequence: Synthetic oligonucleotide
ccagcttgggcaacatagca

SEQ ID NO: 8630 - DNA, 20 bp, Artificial Sequence
  Description of Artificial Sequence: Synthetic oligonucleotide
cagcttgggcaacatagcaa

SEQ ID NO: 8631 - DNA, 20 bp, Artificial Sequence
  Description of Artificial Sequence: Synthetic oligonucleotide
agcttgggcaacatagcaag

SEQ ID NO: 8632 - DNA, 20 bp, Artificial Sequence
  Description of Artificial Sequence: Synthetic oligonucleotide
gcttgggcaacatagcaaga

SEQ ID NO: 8633 - DNA, 20 bp, Artificial Sequence
  Description of Artificial Sequence: Synthetic oligonucleotide
cttgggcaacatagcaagac

SEQ ID NO: 8634 - DNA, 20 bp, Artificial Sequence
  Description of Artificial Sequence: Synthetic oligonucleotide
ttgggcaacatagcaagacc

SEQ ID NO: 8635 - DNA, 20 bp, Artificial Sequence
  Description of Artificial Sequence: Synthetic oligonucleotide
tgggcaacatagcaagaccc

SEQ ID NO: 8636 - DNA, 20 bp, Artificial Sequence
  Description of Artificial Sequence: Synthetic oligonucleotide
gggcaacatagcaagaccct

SEQ ID NO: 8637 - DNA, 20 bp, Artificial Sequence
  Description of Artificial Sequence: Synthetic oligonucleotide
ggcaacatagcaagaccctg

SEQ ID NO: 8638 - DNA, 20 bp, Artificial Sequence
  Description of Artificial Sequence: Synthetic oligonucleotide
gcaacatagcaagaccctgc

SEQ ID NO: 8639 - DNA, 20 bp, Artificial Sequence
  Description of Artificial Sequence: Synthetic oligonucleotide
caacatagcaagaccctgcc

SEQ ID NO: 8640 - DNA, 20 bp, Artificial Sequence
  Description of Artificial Sequence: Synthetic oligonucleotide
aacatagcaagaccctgcct

SEQ ID NO: 8641 - DNA, 20 bp, Artificial Sequence
  Description of Artificial Sequence: Synthetic oligonucleotide
acatagcaagaccctgcctt

SEQ ID NO: 8642 - DNA, 20 bp, Artificial Sequence
  Description of Artificial Sequence: Synthetic oligonucleotide
catagcaagaccctgccttt

SEQ ID NO: 8643 - DNA, 20 bp, Artificial Sequence
  Description of Artificial Sequence: Synthetic oligonucleotide
atagcaagaccctgccttta

SEQ ID NO: 8644 - DNA, 20 bp, Artificial Sequence
  Description of Artificial Sequence: Synthetic oligonucleotide
tagcaagaccctgcctttaa

SEQ ID NO: 8645 - DNA, 20 bp, Artificial Sequence
  Description of Artificial Sequence: Synthetic oligonucleotide
agcaagaccctgcctttaat

SEQ ID NO: 8646 - DNA, 20 bp, Artificial Sequence
  Description of Artificial Sequence: Synthetic oligonucleotide
gcaagaccctgcctttaatt

SEQ ID NO: 8647 - DNA, 20 bp, Artificial Sequence
  Description of Artificial Sequence: Synthetic oligonucleotide
caagaccctgcctttaattt

SEQ ID NO: 8648 - DNA, 20 bp, Artificial Sequence
  Description of Artificial Sequence: Synthetic oligonucleotide
aagaccctgcctttaatttt

SEQ ID NO: 8649 - DNA, 20 bp, Artificial Sequence
  Description of Artificial Sequence: Synthetic oligonucleotide
agaccctgcctttaattttt

SEQ ID NO: 8650 - DNA, 20 bp, Artificial Sequence
  Description of Artificial Sequence: Synthetic oligonucleotide
gaccctgcctttaatttttt

SEQ ID NO: 8651 - DNA, 20 bp, Artificial Sequence
  Description of Artificial Sequence: Synthetic oligonucleotide
accctgcctttaattttttt

SEQ ID NO: 8652 - DNA, 20 bp, Artificial Sequence
  Description of Artificial Sequence: Synthetic oligonucleotide
ccctgcctttaatttttttg

SEQ ID NO: 8653 - DNA, 20 bp, Artificial Sequence
  Description of Artificial Sequence: Synthetic oligonucleotide
cctgcctttaatttttttgt

SEQ ID NO: 8654 - DNA, 20 bp, Artificial Sequence
  Description of Artificial Sequence: Synthetic oligonucleotide
ctgcctttaatttttttgtt

SEQ ID NO: 8655 - DNA, 20 bp, Artificial Sequence
  Description of Artificial Sequence: Synthetic oligonucleotide
tgcctttaatttttttgttt

SEQ ID NO: 8656 - DNA, 20 bp, Artificial Sequence
  Description of Artificial Sequence: Synthetic oligonucleotide
gcctttaatttttttgtttt

SEQ ID NO: 8657 - DNA, 20 bp, Artificial Sequence
  Description of Artificial Sequence: Synthetic oligonucleotide
cctttaatttttttgttttg

SEQ ID NO: 8658 - DNA, 20 bp, Artificial Sequence
  Description of Artificial Sequence: Synthetic oligonucleotide
ctttaatttttttgttttgt

SEQ ID NO: 8659 - DNA, 20 bp, Artificial Sequence
  Description of Artificial Sequence: Synthetic oligonucleotide
tttaatttttttgttttgtt

SEQ ID NO: 8660 - DNA, 20 bp, Artificial Sequence
  Description of Artificial Sequence: Synthetic oligonucleotide
ttaatttttttgttttgttt

SEQ ID NO: 8661 - DNA, 20 bp, Artificial Sequence
  Description of Artificial Sequence: Synthetic oligonucleotide
taatttttttgttttgtttt

SEQ ID NO: 8662 - DNA, 20 bp, Artificial Sequence
  Description of Artificial Sequence: Synthetic oligonucleotide
aatttttttgttttgttttg

SEQ ID NO: 8663 - DNA, 20 bp, Artificial Sequence
  Description of Artificial Sequence: Synthetic oligonucleotide
atttttttgttttgttttgt

SEQ ID NO: 8664 - DNA, 20 bp, Artificial Sequence
  Description of Artificial Sequence: Synthetic oligonucleotide
tttttttgttttgttttgtt

SEQ ID NO: 8665 - DNA, 20 bp, Artificial Sequence
  Description of Artificial Sequence: Synthetic oligonucleotide
ttttttgttttgttttgttt

SEQ ID NO: 8666 - DNA, 20 bp, Artificial Sequence
  Description of Artificial Sequence: Synthetic oligonucleotide
tttttgttttgttttgtttt

SEQ ID NO: 8667 - DNA, 20 bp, Artificial Sequence
  Description of Artificial Sequence: Synthetic oligonucleotide
ttttgttttgttttgttttc

SEQ ID NO: 8668 - DNA, 20 bp, Artificial Sequence
  Description of Artificial Sequence: Synthetic oligonucleotide
tttgttttgttttgttttca

SEQ ID NO: 8669 - DNA, 20 bp, Artificial Sequence
  Description of Artificial Sequence: Synthetic oligonucleotide
ttgttttgttttgttttcaa

SEQ ID NO: 8670 - DNA, 20 bp, Artificial Sequence
  Description of Artificial Sequence: Synthetic oligonucleotide
tgttttgttttgttttcaat

SEQ ID NO: 8671 - DNA, 20 bp, Artificial Sequence
  Description of Artificial Sequence: Synthetic oligonucleotide
gttttgttttgttttcaatt

SEQ ID NO: 8672 - DNA, 20 bp, Artificial Sequence
  Description of Artificial Sequence: Synthetic oligonucleotide
ttttgttttgttttcaattt

SEQ ID NO: 8673 - DNA, 20 bp, Artificial Sequence
  Description of Artificial Sequence: Synthetic oligonucleotide
tttgttttgttttcaattta

SEQ ID NO: 8674 - DNA, 20 bp, Artificial Sequence
  Description of Artificial Sequence: Synthetic oligonucleotide
ttgttttgttttcaatttaa

SEQ ID NO: 8675 - DNA, 20 bp, Artificial Sequence
  Description of Artificial Sequence: Synthetic oligonucleotide
tgttttgttttcaatttaaa

SEQ ID NO: 8676 - DNA, 20 bp, Artificial Sequence
  Description of Artificial Sequence: Synthetic oligonucleotide
gttttgttttcaatttaaag

SEQ ID NO: 8677 - DNA, 20 bp, Artificial Sequence
  Description of Artificial Sequence: Synthetic oligonucleotide
ttttgttttcaatttaaaga

SEQ ID NO: 8678 - DNA, 20 bp, Artificial Sequence
  Description of Artificial Sequence: Synthetic oligonucleotide
tttgttttcaatttaaagaa

SEQ ID NO: 8679 - DNA, 20 bp, Artificial Sequence
  Description of Artificial Sequence: Synthetic oligonucleotide
ttgttttcaatttaaagaaa

SEQ ID NO: 8680 - DNA, 20 bp, Artificial Sequence
  Description of Artificial Sequence: Synthetic oligonucleotide
tgttttcaatttaaagaaag

SEQ ID NO: 8681 - DNA, 20 bp, Artificial Sequence
  Description of Artificial Sequence: Synthetic oligonucleotide
gttttcaatttaaagaaaga

SEQ ID NO: 8682 - DNA, 20 bp, Artificial Sequence
  Description of Artificial Sequence: Synthetic oligonucleotide
ttttcaatttaaagaaagac

SEQ ID NO: 8683 - DNA, 20 bp, Artificial Sequence
  Description of Artificial Sequence: Synthetic oligonucleotide
tttcaatttaaagaaagaca

SEQ ID NO: 8684 - DNA, 20 bp, Artificial Sequence
  Description of Artificial Sequence: Synthetic oligonucleotide
ttcaatttaaagaaagacaa

SEQ ID NO: 8685 - DNA, 20 bp, Artificial Sequence
  Description of Artificial Sequence: Synthetic oligonucleotide
tcaatttaaagaaagacaac

SEQ ID NO: 8686 - DNA, 20 bp, Artificial Sequence
  Description of Artificial Sequence: Synthetic oligonucleotide
caatttaaagaaagacaaca

SEQ ID NO: 8687 - DNA, 20 bp, Artificial Sequence
  Description of Artificial Sequence: Synthetic oligonucleotide
aatttaaagaaagacaacag

SEQ ID NO: 8688 - DNA, 20 bp, Artificial Sequence
  Description of Artificial Sequence: Synthetic oligonucleotide
atttaaagaaagacaacagg

SEQ ID NO: 8689 - DNA, 20 bp, Artificial Sequence
  Description of Artificial Sequence: Synthetic oligonucleotide
tttaaagaaagacaacaggg

SEQ ID NO: 8690 - DNA, 20 bp, Artificial Sequence
  Description of Artificial Sequence: Synthetic oligonucleotide
ttaaagaaagacaacagggc

SEQ ID NO: 8691 - DNA, 20 bp, Artificial Sequence
  Description of Artificial Sequence: Synthetic oligonucleotide
taaagaaagacaacagggcc

SEQ ID NO: 8692 - DNA, 20 bp, Artificial Sequence
  Description of Artificial Sequence: Synthetic oligonucleotide
aaagaaagacaacagggcct

SEQ ID NO: 8693 - DNA, 20 bp, Artificial Sequence
  Description of Artificial Sequence: Synthetic oligonucleotide
aagaaagacaacagggccta

SEQ ID NO: 8694 - DNA, 20 bp, Artificial Sequence
  Description of Artificial Sequence: Synthetic oligonucleotide
agaaagacaacagggcctat

SEQ ID NO: 8695 - DNA, 20 bp, Artificial Sequence
  Description of Artificial Sequence: Synthetic oligonucleotide
gaaagacaacagggcctatg

SEQ ID NO: 8696 - DNA, 20 bp, Artificial Sequence
  Description of Artificial Sequence: Synthetic oligonucleotide
aaagacaacagggcctatgg

SEQ ID NO: 8697 - DNA, 20 bp, Artificial Sequence
  Description of Artificial Sequence: Synthetic oligonucleotide
aagacaacagggcctatggg

SEQ ID NO: 8698 - DNA, 20 bp, Artificial Sequence
  Description of Artificial Sequence: Synthetic oligonucleotide
agacaacagggcctatgggg

SEQ ID NO: 8699 - DNA, 20 bp, Artificial Sequence
  Description of Artificial Sequence: Synthetic oligonucleotide
gacaacagggcctatgggga

SEQ ID NO: 8700 - DNA, 20 bp, Artificial Sequence
  Description of Artificial Sequence: Synthetic oligonucleotide
acaacagggcctatggggag

SEQ ID NO: 8701 - DNA, 20 bp, Artificial Sequence
  Description of Artificial Sequence: Synthetic oligonucleotide
caacagggcctatggggaga

SEQ ID NO: 8702 - DNA, 20 bp, Artificial Sequence
  Description of Artificial Sequence: Synthetic oligonucleotide
aacagggcctatggggagag

SEQ ID NO: 8703 - DNA, 20 bp, Artificial Sequence
  Description of Artificial Sequence: Synthetic oligonucleotide
acagggcctatggggagagg

SEQ ID NO: 8704 - DNA, 20 bp, Artificial Sequence
  Description of Artificial Sequence: Synthetic oligonucleotide
cagggcctatggggagaggg

SEQ ID NO: 8705 - DNA, 20 bp, Artificial Sequence
  Description of Artificial Sequence: Synthetic oligonucleotide
agggcctatggggagagggg

SEQ ID NO: 8706 - DNA, 20 bp, Artificial Sequence
  Description of Artificial Sequence: Synthetic oligonucleotide
gggcctatggggagaggggc

SEQ ID NO: 8707 - DNA, 20 bp, Artificial Sequence
  Description of Artificial Sequence: Synthetic oligonucleotide
ggcctatggggagaggggcc

SEQ ID NO: 8708 - DNA, 20 bp, Artificial Sequence
  Description of Artificial Sequence: Synthetic oligonucleotide
gcctatggggagaggggccc

SEQ ID NO: 8709 - DNA, 20 bp, Artificial Sequence
  Description of Artificial Sequence: Synthetic oligonucleotide
cctatggggagaggggcccc

SEQ ID NO: 8710 - DNA, 20 bp, Artificial Sequence
  Description of Artificial Sequence: Synthetic oligonucleotide
ctatggggagaggggcccct

SEQ ID NO: 8711 - DNA, 20 bp, Artificial Sequence
  Description of Artificial Sequence: Synthetic oligonucleotide
tatggggagaggggcccctg

SEQ ID NO: 8712 - DNA, 20 bp, Artificial Sequence
  Description of Artificial Sequence: Synthetic oligonucleotide
atggggagaggggcccctgg

SEQ ID NO: 8713 - DNA, 20 bp, Artificial Sequence
  Description of Artificial Sequence: Synthetic oligonucleotide
tggggagaggggcccctggt

SEQ ID NO: 8714 - DNA, 20 bp, Artificial Sequence
  Description of Artificial Sequence: Synthetic oligonucleotide
ggggagaggggcccctggtg

SEQ ID NO: 8715 - DNA, 20 bp, Artificial Sequence
  Description of Artificial Sequence: Synthetic oligonucleotide
gggagaggggcccctggtgg

SEQ ID NO: 8716 - DNA, 20 bp, Artificial Sequence
  Description of Artificial Sequence: Synthetic oligonucleotide
ggagaggggcccctggtgga

SEQ ID NO: 8717 - DNA, 20 bp, Artificial Sequence
  Description of Artificial Sequence: Synthetic oligonucleotide
gagaggggcccctggtggac

SEQ ID NO: 8718 - DNA, 20 bp, Artificial Sequence
  Description of Artificial Sequence: Synthetic oligonucleotide
agaggggcccctggtggact

SEQ ID NO: 8719 - DNA, 20 bp, Artificial Sequence
  Description of Artificial Sequence: Synthetic oligonucleotide
gaggggcccctggtggacta

SEQ ID NO: 8720 - DNA, 20 bp, Artificial Sequence
  Description of Artificial Sequence: Synthetic oligonucleotide
aggggcccctggtggactaa

SEQ ID NO: 8721 - DNA, 20 bp, Artificial Sequence
  Description of Artificial Sequence: Synthetic oligonucleotide
ggggcccctggtggactaac

SEQ ID NO: 8722 - DNA, 20 bp, Artificial Sequence
  Description of Artificial Sequence: Synthetic oligonucleotide
gggcccctggtggactaaca

SEQ ID NO: 8723 - DNA, 20 bp, Artificial Sequence
  Description of Artificial Sequence: Synthetic oligonucleotide
ggcccctggtggactaacac

SEQ ID NO: 8724 - DNA, 20 bp, Artificial Sequence
  Description of Artificial Sequence: Synthetic oligonucleotide
gcccctggtggactaacaca

SEQ ID NO: 8725 - DNA, 20 bp, Artificial Sequence
  Description of Artificial Sequence: Synthetic oligonucleotide
cccctggtggactaacacac

SEQ ID NO: 8726 - DNA, 20 bp, Artificial Sequence
  Description of Artificial Sequence: Synthetic oligonucleotide
ccctggtggactaacacacc

SEQ ID NO: 8727 - DNA, 20 bp, Artificial Sequence
  Description of Artificial Sequence: Synthetic oligonucleotide
cctggtggactaacacaccc

SEQ ID NO: 8728 - DNA, 20 bp, Artificial Sequence
  Description of Artificial Sequence: Synthetic oligonucleotide
ctggtggactaacacaccct

SEQ ID NO: 8729 - DNA, 20 bp, Artificial Sequence
  Description of Artificial Sequence: Synthetic oligonucleotide
tggtggactaacacacccta

SEQ ID NO: 8730 - DNA, 20 bp, Artificial Sequence
  Description of Artificial Sequence: Synthetic oligonucleotide
ggtggactaacacaccctac

SEQ ID NO: 8731 - DNA, 20 bp, Artificial Sequence
  Description of Artificial Sequence: Synthetic oligonucleotide
gtggactaacacaccctacc

SEQ ID NO: 8732 - DNA, 20 bp, Artificial Sequence
  Description of Artificial Sequence: Synthetic oligonucleotide
tggactaacacaccctacct

SEQ ID NO: 8733 - DNA, 20 bp, Artificial Sequence
  Description of Artificial Sequence: Synthetic oligonucleotide
ggactaacacaccctacctg

SEQ ID NO: 8734 - DNA, 20 bp, Artificial Sequence
  Description of Artificial Sequence: Synthetic oligonucleotide
gactaacacaccctacctga

SEQ ID NO: 8735 - DNA, 20 bp, Artificial Sequence
  Description of Artificial Sequence: Synthetic oligonucleotide
actaacacaccctacctgag

SEQ ID NO: 8736 - DNA, 20 bp, Artificial Sequence
  Description of Artificial Sequence: Synthetic oligonucleotide
ctaacacaccctacctgagg

SEQ ID NO: 8737 - DNA, 20 bp, Artificial Sequence
  Description of Artificial Sequence: Synthetic oligonucleotide
taacacaccctacctgaggt

SEQ ID NO: 8738 - DNA, 20 bp, Artificial Sequence
  Description of Artificial Sequence: Synthetic oligonucleotide
aacacaccctacctgaggtc

SEQ ID NO: 8739 - DNA, 20 bp, Artificial Sequence
  Description of Artificial Sequence: Synthetic oligonucleotide
acacaccctacctgaggtca

SEQ ID NO: 8740 - DNA, 20 bp, Artificial Sequence
  Description of Artificial Sequence: Synthetic oligonucleotide
cacaccctacctgaggtcat

SEQ ID NO: 8741 - DNA, 20 bp, Artificial Sequence
  Description of Artificial Sequence: Synthetic oligonucleotide
acaccctacctgaggtcatc

SEQ ID NO: 8742 - DNA, 20 bp, Artificial Sequence
  Description of Artificial Sequence: Synthetic oligonucleotide
caccctacctgaggtcatct

SEQ ID NO: 8743 - DNA, 20 bp, Artificial Sequence
  Description of Artificial Sequence: Synthetic oligonucleotide
accctacctgaggtcatctt

SEQ ID NO: 8744 - DNA, 20 bp, Artificial Sequence
  Description of Artificial Sequence: Synthetic oligonucleotide
ccctacctgaggtcatcttg

SEQ ID NO: 8745 - DNA, 20 bp, Artificial Sequence
  Description of Artificial Sequence: Synthetic oligonucleotide
cctacctgaggtcatcttgc

SEQ ID NO: 8746 - DNA, 20 bp, Artificial Sequence
  Description of Artificial Sequence: Synthetic oligonucleotide
ctacctgaggtcatcttgca

SEQ ID NO: 8747 - DNA, 20 bp, Artificial Sequence
  Description of Artificial Sequence: Synthetic oligonucleotide
tacctgaggtcatcttgcag

SEQ ID NO: 8748 - DNA, 20 bp, Artificial Sequence
  Description of Artificial Sequence: Synthetic oligonucleotide
acctgaggtcatcttgcagt

SEQ ID NO: 8749 - DNA, 20 bp, Artificial Sequence
  Description of Artificial Sequence: Synthetic oligonucleotide
cctgaggtcatcttgcagtt

SEQ ID NO: 8750 - DNA, 20 bp, Artificial Sequence
  Description of Artificial Sequence: Synthetic oligonucleotide
ctgaggtcatcttgcagttc

SEQ ID NO: 8751 - DNA, 20 bp, Artificial Sequence
  Description of Artificial Sequence: Synthetic oligonucleotide
tgaggtcatcttgcagttca

SEQ ID NO: 8752 - DNA, 20 bp, Artificial Sequence
  Description of Artificial Sequence: Synthetic oligonucleotide
gaggtcatcttgcagttcac

SEQ ID NO: 8753 - DNA, 20 bp, Artificial Sequence
  Description of Artificial Sequence: Synthetic oligonucleotide
aggtcatcttgcagttcacc

SEQ ID NO: 8754 - DNA, 20 bp, Artificial Sequence
  Description of Artificial Sequence: Synthetic oligonucleotide
ggtcatcttgcagttcacca

SEQ ID NO: 8755 - DNA, 20 bp, Artificial Sequence
  Description of Artificial Sequence: Synthetic oligonucleotide
gtcatcttgcagttcaccaa

SEQ ID NO: 8756 - DNA, 20 bp, Artificial Sequence
  Description of Artificial Sequence: Synthetic oligonucleotide
tcatcttgcagttcaccaaa

SEQ ID NO: 8757 - DNA, 20 bp, Artificial Sequence
  Description of Artificial Sequence: Synthetic oligonucleotide
catcttgcagttcaccaaaa

SEQ ID NO: 8758 - DNA, 20 bp, Artificial Sequence
  Description of Artificial Sequence: Synthetic oligonucleotide
atcttgcagttcaccaaaaa

SEQ ID NO: 8759 - DNA, 20 bp, Artificial Sequence
  Description of Artificial Sequence: Synthetic oligonucleotide
tcttgcagttcaccaaaaat

SEQ ID NO: 8760 - DNA, 20 bp, Artificial Sequence
  Description of Artificial Sequence: Synthetic oligonucleotide
cttgcagttcaccaaaaatg

SEQ ID NO: 8761 - DNA, 20 bp, Artificial Sequence
  Description of Artificial Sequence: Synthetic oligonucleotide
ttgcagttcaccaaaaatgg

SEQ ID NO: 8762 - DNA, 20 bp, Artificial Sequence
  Description of Artificial Sequence: Synthetic oligonucleotide
tgcagttcaccaaaaatggc

SEQ ID NO: 8763 - DNA, 20 bp, Artificial Sequence
  Description of Artificial Sequence: Synthetic oligonucleotide
gcagttcaccaaaaatggcg

SEQ ID NO: 8764 - DNA, 20 bp, Artificial Sequence
  Description of Artificial Sequence: Synthetic oligonucleotide
cagttcaccaaaaatggcgg

SEQ ID NO: 8765 - DNA, 20 bp, Artificial Sequence
  Description of Artificial Sequence: Synthetic oligonucleotide
agttcaccaaaaatggcgga

SEQ ID NO: 8766 - DNA, 20 bp, Artificial Sequence
  Description of Artificial Sequence: Synthetic oligonucleotide
gttcaccaaaaatggcggag

SEQ ID NO: 8767 - DNA, 20 bp, Artificial Sequence
  Description of Artificial Sequence: Synthetic oligonucleotide
ttcaccaaaaatggcggaga

SEQ ID NO: 8768 - DNA, 20 bp, Artificial Sequence
  Description of Artificial Sequence: Synthetic oligonucleotide
tcaccaaaaatggcggagac

SEQ ID NO: 8769 - DNA, 20 bp, Artificial Sequence
  Description of Artificial Sequence: Synthetic oligonucleotide
caccaaaaatggcggagacc

SEQ ID NO: 8770 - DNA, 20 bp, Artificial Sequence
  Description of Artificial Sequence: Synthetic oligonucleotide
accaaaaatggcggagaccc

SEQ ID NO: 8771 - DNA, 20 bp, Artificial Sequence
  Description of Artificial Sequence: Synthetic oligonucleotide
ccaaaaatggcggagacccc

SEQ ID NO: 8772 - DNA, 20 bp, Artificial Sequence
  Description of Artificial Sequence: Synthetic oligonucleotide
caaaaatggcggagacccct

SEQ ID NO: 8773 - DNA, 20 bp, Artificial Sequence
  Description of Artificial Sequence: Synthetic oligonucleotide
aaaaatggcggagacccctg

SEQ ID NO: 8774 - DNA, 20 bp, Artificial Sequence
  Description of Artificial Sequence: Synthetic oligonucleotide
aaaatggcggagacccctga

SEQ ID NO: 8775 - DNA, 20 bp, Artificial Sequence
  Description of Artificial Sequence: Synthetic oligonucleotide
aaatggcggagacccctgag

SEQ ID NO: 8776 - DNA, 20 bp, Artificial Sequence
  Description of Artificial Sequence: Synthetic oligonucleotide
aatggcggagacccctgagg

SEQ ID NO: 8777 - DNA, 20 bp, Artificial Sequence
  Description of Artificial Sequence: Synthetic oligonucleotide
atggcggagacccctgaggc

SEQ ID NO: 8778 - DNA, 20 bp, Artificial Sequence
  Description of Artificial Sequence: Synthetic oligonucleotide
tggcggagacccctgaggct

SEQ ID NO: 8779 - DNA, 20 bp, Artificial Sequence
  Description of Artificial Sequence: Synthetic oligonucleotide
ggcggagacccctgaggctg

SEQ ID NO: 8780 - DNA, 20 bp, Artificial Sequence
  Description of Artificial Sequence: Synthetic oligonucleotide
gcggagacccctgaggctgg

SEQ ID NO: 8781 - DNA, 20 bp, Artificial Sequence
  Description of Artificial Sequence: Synthetic oligonucleotide
cggagacccctgaggctgga

SEQ ID NO: 8782 - DNA, 20 bp, Artificial Sequence
  Description of Artificial Sequence: Synthetic oligonucleotide
ggagacccctgaggctggat

SEQ ID NO: 8783 - DNA, 20 bp, Artificial Sequence
  Description of Artificial Sequence: Synthetic oligonucleotide
gagacccctgaggctggatt

SEQ ID NO: 8784 - DNA, 20 bp, Artificial Sequence
  Description of Artificial Sequence: Synthetic oligonucleotide
agacccctgaggctggattt

SEQ ID NO: 8785 - DNA, 20 bp, Artificial Sequence
  Description of Artificial Sequence: Synthetic oligonucleotide
gacccctgaggctggatttc

SEQ ID NO: 8786 - DNA, 20 bp, Artificial Sequence
  Description of Artificial Sequence: Synthetic oligonucleotide
acccctgaggctggatttca

SEQ ID NO: 8787 - DNA, 20 bp, Artificial Sequence
  Description of Artificial Sequence: Synthetic oligonucleotide
cccctgaggctggatttcaa

SEQ ID NO: 8788 - DNA, 20 bp, Artificial Sequence
  Description of Artificial Sequence: Synthetic oligonucleotide
ccctgaggctggatttcaaa

SEQ ID NO: 8789 - DNA, 20 bp, Artificial Sequence
  Description of Artificial Sequence: Synthetic oligonucleotide
cctgaggctggatttcaaat

SEQ ID NO: 8790 - DNA, 20 bp, Artificial Sequence
  Description of Artificial Sequence: Synthetic oligonucleotide
ctgaggctggatttcaaata

SEQ ID NO: 8791 - DNA, 20 bp, Artificial Sequence
  Description of Artificial Sequence: Synthetic oligonucleotide
tgaggctggatttcaaatag

SEQ ID NO: 8792 - DNA, 20 bp, Artificial Sequence
  Description of Artificial Sequence: Synthetic oligonucleotide
gaggctggatttcaaatagt

SEQ ID NO: 8793 - DNA, 20 bp, Artificial Sequence
  Description of Artificial Sequence: Synthetic oligonucleotide
aggctggatttcaaatagtc

SEQ ID NO: 8794 - DNA, 20 bp, Artificial Sequence
  Description of Artificial Sequence: Synthetic oligonucleotide
ggctggatttcaaatagtcc

SEQ ID NO: 8795 - DNA, 20 bp, Artificial Sequence
  Description of Artificial Sequence: Synthetic oligonucleotide
gctggatttcaaatagtcca

SEQ ID NO: 8796 - DNA, 20 bp, Artificial Sequence
  Description of Artificial Sequence: Synthetic oligonucleotide
ctggatttcaaatagtccac

SEQ ID NO: 8797 - DNA, 20 bp, Artificial Sequence
  Description of Artificial Sequence: Synthetic oligonucleotide
tggatttcaaatagtccact

SEQ ID NO: 8798 - DNA, 20 bp, Artificial Sequence
  Description of Artificial Sequence: Synthetic oligonucleotide
ggatttcaaatagtccactc

SEQ ID NO: 8799 - DNA, 20 bp, Artificial Sequence
  Description of Artificial Sequence: Synthetic oligonucleotide
gatttcaaatagtccactct

SEQ ID NO: 8800 - DNA, 20 bp, Artificial Sequence
  Description of Artificial Sequence: Synthetic oligonucleotide
atttcaaatagtccactctg

SEQ ID NO: 8801 - DNA, 20 bp, Artificial Sequence
  Description of Artificial Sequence: Synthetic oligonucleotide
tttcaaatagtccactctgc

SEQ ID NO: 8802 - DNA, 20 bp, Artificial Sequence
  Description of Artificial Sequence: Synthetic oligonucleotide
ttcaaatagtccactctgcc

SEQ ID NO: 8803 - DNA, 20 bp, Artificial Sequence
  Description of Artificial Sequence: Synthetic oligonucleotide
tcaaatagtccactctgcct

SEQ ID NO: 8804 - DNA, 20 bp, Artificial Sequence
  Description of Artificial Sequence: Synthetic oligonucleotide
caaatagtccactctgcctc

SEQ ID NO: 8805 - DNA, 20 bp, Artificial Sequence
  Description of Artificial Sequence: Synthetic oligonucleotide
aaatagtccactctgcctct

SEQ ID NO: 8806 - DNA, 20 bp, Artificial Sequence
  Description of Artificial Sequence: Synthetic oligonucleotide
aatagtccactctgcctctc

SEQ ID NO: 8807 - DNA, 20 bp, Artificial Sequence
  Description of Artificial Sequence: Synthetic oligonucleotide
atagtccactctgcctctcc

SEQ ID NO: 8808 - DNA, 20 bp, Artificial Sequence
  Description of Artificial Sequence: Synthetic oligonucleotide
tagtccactctgcctctccc

SEQ ID NO: 8809 - DNA, 20 bp, Artificial Sequence
  Description of Artificial Sequence: Synthetic oligonucleotide
agtccactctgcctctcccc

SEQ ID NO: 8810 - DNA, 20 bp, Artificial Sequence
  Description of Artificial Sequence: Synthetic oligonucleotide
gtccactctgcctctcccca

SEQ ID NO: 8811 - DNA, 20 bp, Artificial Sequence
  Description of Artificial Sequence: Synthetic oligonucleotide
tccactctgcctctccccaa

SEQ ID NO: 8812 - DNA, 20 bp, Artificial Sequence
  Description of Artificial Sequence: Synthetic oligonucleotide
ccactctgcctctccccaac

SEQ ID NO: 8813 - DNA, 20 bp, Artificial Sequence
  Description of Artificial Sequence: Synthetic oligonucleotide
cactctgcctctccccaacc

SEQ ID NO: 8814 - DNA, 20 bp, Artificial Sequence
  Description of Artificial Sequence: Synthetic oligonucleotide
actctgcctctccccaacct

SEQ ID NO: 8815 - DNA, 20 bp, Artificial Sequence
  Description of Artificial Sequence: Synthetic oligonucleotide
ctctgcctctccccaacctg

SEQ ID NO: 8816 - DNA, 20 bp, Artificial Sequence
  Description of Artificial Sequence: Synthetic oligonucleotide
tctgcctctccccaacctgg

SEQ ID NO: 8817 - DNA, 20 bp, Artificial Sequence
  Description of Artificial Sequence: Synthetic oligonucleotide
ctgcctctccccaacctgga

SEQ ID NO: 8818 - DNA, 20 bp, Artificial Sequence
  Description of Artificial Sequence: Synthetic oligonucleotide
tgcctctccccaacctggaa

SEQ ID NO: 8819 - DNA, 20 bp, Artificial Sequence
  Description of Artificial Sequence: Synthetic oligonucleotide
gcctctccccaacctggaac

SEQ ID NO: 8820 - DNA, 20 bp, Artificial Sequence
  Description of Artificial Sequence: Synthetic oligonucleotide
cctctccccaacctggaaca

SEQ ID NO: 8821 - DNA, 20 bp, Artificial Sequence
  Description of Artificial Sequence: Synthetic oligonucleotide
ctctccccaacctggaacag

SEQ ID NO: 8822 - DNA, 20 bp, Artificial Sequence
  Description of Artificial Sequence: Synthetic oligonucleotide
tctccccaacctggaacagc

SEQ ID NO: 8823 - DNA, 20 bp, Artificial Sequence
  Description of Artificial Sequence: Synthetic oligonucleotide
ctccccaacctggaacagct

SEQ ID NO: 8824 - DNA, 20 bp, Artificial Sequence
  Description of Artificial Sequence: Synthetic oligonucleotide
tccccaacctggaacagctc

SEQ ID NO: 8825 - DNA, 20 bp, Artificial Sequence
  Description of Artificial Sequence: Synthetic oligonucleotide
ccccaacctggaacagctcc

SEQ ID NO: 8826 - DNA, 20 bp, Artificial Sequence
  Description of Artificial Sequence: Synthetic oligonucleotide
cccaacctggaacagctcct

SEQ ID NO: 8827 - DNA, 20 bp, Artificial Sequence
  Description of Artificial Sequence: Synthetic oligonucleotide
ccaacctggaacagctcctg

SEQ ID NO: 8828 - DNA, 20 bp, Artificial Sequence
  Description of Artificial Sequence: Synthetic oligonucleotide
caacctggaacagctcctgg

SEQ ID NO: 8829 - DNA, 20 bp, Artificial Sequence
  Description of Artificial Sequence: Synthetic oligonucleotide
aacctggaacagctcctggc

SEQ ID NO: 8830 - DNA, 20 bp, Artificial Sequence
  Description of Artificial Sequence: Synthetic oligonucleotide
acctggaacagctcctggca

SEQ ID NO: 8831 - DNA, 20 bp, Artificial Sequence
  Description of Artificial Sequence: Synthetic oligonucleotide
cctggaacagctcctggcaa

SEQ ID NO: 8832 - DNA, 20 bp, Artificial Sequence
  Description of Artificial Sequence: Synthetic oligonucleotide
ctggaacagctcctggcaat

SEQ ID NO: 8833 - DNA, 20 bp, Artificial Sequence
  Description of Artificial Sequence: Synthetic oligonucleotide
tggaacagctcctggcaatc

SEQ ID NO: 8834 - DNA, 20 bp, Artificial Sequence
  Description of Artificial Sequence: Synthetic oligonucleotide
ggaacagctcctggcaatcc

SEQ ID NO: 8835 - DNA, 20 bp, Artificial Sequence
  Description of Artificial Sequence: Synthetic oligonucleotide
gaacagctcctggcaatccc

SEQ ID NO: 8836 - DNA, 20 bp, Artificial Sequence
  Description of Artificial Sequence: Synthetic oligonucleotide
aacagctcctggcaatccct

SEQ ID NO: 8837 - DNA, 20 bp, Artificial Sequence
  Description of Artificial Sequence: Synthetic oligonucleotide
acagctcctggcaatccctg

SEQ ID NO: 8838 - DNA, 20 bp, Artificial Sequence
  Description of Artificial Sequence: Synthetic oligonucleotide
cagctcctggcaatccctgg

SEQ ID NO: 8839 - DNA, 20 bp, Artificial Sequence
  Description of Artificial Sequence: Synthetic oligonucleotide
agctcctggcaatccctggg

SEQ ID NO: 8840 - DNA, 20 bp, Artificial Sequence
  Description of Artificial Sequence: Synthetic oligonucleotide
gctcctggcaatccctgggc

SEQ ID NO: 8841 - DNA, 20 bp, Artificial Sequence
  Description of Artificial Sequence: Synthetic oligonucleotide
ctcctggcaatccctgggca

SEQ ID NO: 8842 - DNA, 20 bp, Artificial Sequence
  Description of Artificial Sequence: Synthetic oligonucleotide
tcctggcaatccctgggcag

SEQ ID NO: 8843 - DNA, 20 bp, Artificial Sequence
  Description of Artificial Sequence: Synthetic oligonucleotide
cctggcaatccctgggcagc

SEQ ID NO: 8844 - DNA, 20 bp, Artificial Sequence
  Description of Artificial Sequence: Synthetic oligonucleotide
ctggcaatccctgggcagcc

SEQ ID NO: 8845 - DNA, 20 bp, Artificial Sequence
  Description of Artificial Sequence: Synthetic oligonucleotide
tggcaatccctgggcagccc

SEQ ID NO: 8846 - DNA, 20 bp, Artificial Sequence
  Description of Artificial Sequence: Synthetic oligonucleotide
ggcaatccctgggcagccct

SEQ ID NO: 8847 - DNA, 20 bp, Artificial Sequence
  Description of Artificial Sequence: Synthetic oligonucleotide
gcaatccctgggcagccctg

SEQ ID NO: 8848 - DNA, 20 bp, Artificial Sequence
  Description of Artificial Sequence: Synthetic oligonucleotide
caatccctgggcagccctga

SEQ ID NO: 8849 - DNA, 20 bp, Artificial Sequence
  Description of Artificial Sequence: Synthetic oligonucleotide
aatccctgggcagccctgaa

SEQ ID NO: 8850 - DNA, 20 bp, Artificial Sequence
  Description of Artificial Sequence: Synthetic oligonucleotide
atccctgggcagccctgaag

SEQ ID NO: 8851 - DNA, 20 bp, Artificial Sequence
  Description of Artificial Sequence: Synthetic oligonucleotide
tccctgggcagccctgaagg

SEQ ID NO: 8852 - DNA, 20 bp, Artificial Sequence
  Description of Artificial Sequence: Synthetic oligonucleotide
ccctgggcagccctgaaggg

SEQ ID NO: 8853 - DNA, 20 bp, Artificial Sequence
  Description of Artificial Sequence: Synthetic oligonucleotide
cctgggcagccctgaaggga

SEQ ID NO: 8854 - DNA, 20 bp, Artificial Sequence
  Description of Artificial Sequence: Synthetic oligonucleotide
ctgggcagccctgaagggag

SEQ ID NO: 8855 - DNA, 20 bp, Artificial Sequence
  Description of Artificial Sequence: Synthetic oligonucleotide
tgggcagccctgaagggaga

SEQ ID NO: 8856 - DNA, 20 bp, Artificial Sequence
  Description of Artificial Sequence: Synthetic oligonucleotide
gggcagccctgaagggagat

SEQ ID NO: 8857 - DNA, 20 bp, Artificial Sequence
  Description of Artificial Sequence: Synthetic oligonucleotide
ggcagccctgaagggagata

SEQ ID NO: 8858 - DNA, 20 bp, Artificial Sequence
  Description of Artificial Sequence: Synthetic oligonucleotide
gcagccctgaagggagataa

SEQ ID NO: 8859 - DNA, 20 bp, Artificial Sequence
  Description of Artificial Sequence: Synthetic oligonucleotide
cagccctgaagggagataaa

SEQ ID NO: 8860 - DNA, 20 bp, Artificial Sequence
  Description of Artificial Sequence: Synthetic oligonucleotide
agccctgaagggagataaag

SEQ ID NO: 8861 - DNA, 20 bp, Artificial Sequence
  Description of Artificial Sequence: Synthetic oligonucleotide
gccctgaagggagataaagt

SEQ ID NO: 8862 - DNA, 20 bp, Artificial Sequence
  Description of Artificial Sequence: Synthetic oligonucleotide
ccctgaagggagataaagtg

SEQ ID NO: 8863 - DNA, 20 bp, Artificial Sequence
  Description of Artificial Sequence: Synthetic oligonucleotide
cctgaagggagataaagtgg

SEQ ID NO: 8864 - DNA, 20 bp, Artificial Sequence
  Description of Artificial Sequence: Synthetic oligonucleotide
ctgaagggagataaagtgga

SEQ ID NO: 8865 - DNA, 20 bp, Artificial Sequence
  Description of Artificial Sequence: Synthetic oligonucleotide
tgaagggagataaagtggag

SEQ ID NO: 8866 - DNA, 20 bp, Artificial Sequence
  Description of Artificial Sequence: Synthetic oligonucleotide
gaagggagataaagtggaga

SEQ ID NO: 8867 - DNA, 20 bp, Artificial Sequence
  Description of Artificial Sequence: Synthetic oligonucleotide
aagggagataaagtggagac

SEQ ID NO: 8868 - DNA, 20 bp, Artificial Sequence
  Description of Artificial Sequence: Synthetic oligonucleotide
agggagataaagtggagact

SEQ ID NO: 8869 - DNA, 20 bp, Artificial Sequence
  Description of Artificial Sequence: Synthetic oligonucleotide
gggagataaagtggagactt

SEQ ID NO: 8870 - DNA, 20 bp, Artificial Sequence
  Description of Artificial Sequence: Synthetic oligonucleotide
ggagataaagtggagacttg

SEQ ID NO: 8871 - DNA, 20 bp, Artificial Sequence
  Description of Artificial Sequence: Synthetic oligonucleotide
gagataaagtggagacttga

SEQ ID NO: 8872 - DNA, 20 bp, Artificial Sequence
  Description of Artificial Sequence: Synthetic oligonucleotide
agataaagtggagacttgaa

SEQ ID NO: 8873 - DNA, 20 bp, Artificial Sequence
  Description of Artificial Sequence: Synthetic oligonucleotide
gataaagtggagacttgaaa

SEQ ID NO: 8874 - DNA, 20 bp, Artificial Sequence
  Description of Artificial Sequence: Synthetic oligonucleotide
ataaagtggagacttgaaac

SEQ ID NO: 8875 - DNA, 20 bp, Artificial Sequence
  Description of Artificial Sequence: Synthetic oligonucleotide
taaagtggagacttgaaaca

SEQ ID NO: 8876 - DNA, 20 bp, Artificial Sequence
  Description of Artificial Sequence: Synthetic oligonucleotide
aaagtggagacttgaaacag

SEQ ID NO: 8877 - DNA, 20 bp, Artificial Sequence
  Description of Artificial Sequence: Synthetic oligonucleotide
aagtggagacttgaaacagg

SEQ ID NO: 8878 - DNA, 20 bp, Artificial Sequence
  Description of Artificial Sequence: Synthetic oligonucleotide
agtggagacttgaaacagga

SEQ ID NO: 8879 - DNA, 20 bp, Artificial Sequence
  Description of Artificial Sequence: Synthetic oligonucleotide
gtggagacttgaaacaggag

SEQ ID NO: 8880 - DNA, 20 bp, Artificial Sequence
  Description of Artificial Sequence: Synthetic oligonucleotide
tggagacttgaaacaggagg

SEQ ID NO: 8881 - DNA, 20 bp, Artificial Sequence
  Description of Artificial Sequence: Synthetic oligonucleotide
ggagacttgaaacaggaggg

SEQ ID NO: 8882 - DNA, 20 bp, Artificial Sequence
  Description of Artificial Sequence: Synthetic oligonucleotide
gagacttgaaacaggagggc

SEQ ID NO: 8883 - DNA, 20 bp, Artificial Sequence
  Description of Artificial Sequence: Synthetic oligonucleotide
agacttgaaacaggagggca

SEQ ID NO: 8884 - DNA, 20 bp, Artificial Sequence
  Description of Artificial Sequence: Synthetic oligonucleotide
gacttgaaacaggagggcag

SEQ ID NO: 8885 - DNA, 20 bp, Artificial Sequence
  Description of Artificial Sequence: Synthetic oligonucleotide
acttgaaacaggagggcagc

SEQ ID NO: 8886 - DNA, 20 bp, Artificial Sequence
  Description of Artificial Sequence: Synthetic oligonucleotide
cttgaaacaggagggcagcc

SEQ ID NO: 8887 - DNA, 20 bp, Artificial Sequence
  Description of Artificial Sequence: Synthetic oligonucleotide
ttgaaacaggagggcagccc

SEQ ID NO: 8888 - DNA, 20 bp, Artificial Sequence
  Description of Artificial Sequence: Synthetic oligonucleotide
tgaaacaggagggcagcccc

SEQ ID NO: 8889 - DNA, 20 bp, Artificial Sequence
  Description of Artificial Sequence: Synthetic oligonucleotide
gaaacaggagggcagcccct

SEQ ID NO: 8890 - DNA, 20 bp, Artificial Sequence
  Description of Artificial Sequence: Synthetic oligonucleotide
aaacaggagggcagcccctg

SEQ ID NO: 8891 - DNA, 20 bp, Artificial Sequence
  Description of Artificial Sequence: Synthetic oligonucleotide
aacaggagggcagcccctgg

SEQ ID NO: 8892 - DNA, 20 bp, Artificial Sequence
  Description of Artificial Sequence: Synthetic oligonucleotide
acaggagggcagcccctggg

SEQ ID NO: 8893 - DNA, 20 bp, Artificial Sequence
  Description of Artificial Sequence: Synthetic oligonucleotide
caggagggcagcccctgggg

SEQ ID NO: 8894 - DNA, 20 bp, Artificial Sequence
  Description of Artificial Sequence: Synthetic oligonucleotide
aggagggcagcccctggggg

SEQ ID NO: 8895 - DNA, 20 bp, Artificial Sequence
  Description of Artificial Sequence: Synthetic oligonucleotide
ggagggcagcccctgggggg

SEQ ID NO: 8896 - DNA, 20 bp, Artificial Sequence
  Description of Artificial Sequence: Synthetic oligonucleotide
gagggcagcccctggggggg

SEQ ID NO: 8897 - DNA, 20 bp, Artificial Sequence
  Description of Artificial Sequence: Synthetic oligonucleotide
agggcagcccctgggggggg

SEQ ID NO: 8898 - DNA, 20 bp, Artificial Sequence
  Description of Artificial Sequence: Synthetic oligonucleotide
gggcagcccctggggggggt

SEQ ID NO: 8899 - DNA, 20 bp, Artificial Sequence
  Description of Artificial Sequence: Synthetic oligonucleotide
ggcagcccctggggggggtc

SEQ ID NO: 8900 - DNA, 20 bp, Artificial Sequence
  Description of Artificial Sequence: Synthetic oligonucleotide
gcagcccctggggggggtct

SEQ ID NO: 8901 - DNA, 20 bp, Artificial Sequence
  Description of Artificial Sequence: Synthetic oligonucleotide
cagcccctggggggggtctc

SEQ ID NO: 8902 - DNA, 20 bp, Artificial Sequence
  Description of Artificial Sequence: Synthetic oligonucleotide
agcccctggggggggtctca

SEQ ID NO: 8903 - DNA, 20 bp, Artificial Sequence
  Description of Artificial Sequence: Synthetic oligonucleotide
gcccctggggggggtctcag

SEQ ID NO: 8904 - DNA, 20 bp, Artificial Sequence
  Description of Artificial Sequence: Synthetic oligonucleotide
cccctggggggggtctcagg

SEQ ID NO: 8905 - DNA, 20 bp, Artificial Sequence
  Description of Artificial Sequence: Synthetic oligonucleotide
ccctggggggggtctcagga

SEQ ID NO: 8906 - DNA, 20 bp, Artificial Sequence
  Description of Artificial Sequence: Synthetic oligonucleotide
cctggggggggtctcaggag

SEQ ID NO: 8907 - DNA, 20 bp, Artificial Sequence
  Description of Artificial Sequence: Synthetic oligonucleotide
ctggggggggtctcaggagc

SEQ ID NO: 8908 - DNA, 20 bp, Artificial Sequence
  Description of Artificial Sequence: Synthetic oligonucleotide
tggggggggtctcaggagcc

SEQ ID NO: 8909 - DNA, 20 bp, Artificial Sequence
  Description of Artificial Sequence: Synthetic oligonucleotide
ggggggggtctcaggagcca

SEQ ID NO: 8910 - DNA, 20 bp, Artificial Sequence
  Description of Artificial Sequence: Synthetic oligonucleotide
gggggggtctcaggagccag

SEQ ID NO: 8911 - DNA, 20 bp, Artificial Sequence
  Description of Artificial Sequence: Synthetic oligonucleotide
ggggggtctcaggagccagg

SEQ ID NO: 8912 - DNA, 20 bp, Artificial Sequence
  Description of Artificial Sequence: Synthetic oligonucleotide
gggggtctcaggagccaggc

SEQ ID NO: 8913 - DNA, 20 bp, Artificial Sequence
  Description of Artificial Sequence: Synthetic oligonucleotide
ggggtctcaggagccaggca

SEQ ID NO: 8914 - DNA, 20 bp, Artificial Sequence
  Description of Artificial Sequence: Synthetic oligonucleotide
gggtctcaggagccaggcat

SEQ ID NO: 8915 - DNA, 20 bp, Artificial Sequence
  Description of Artificial Sequence: Synthetic oligonucleotide
ggtctcaggagccaggcata

SEQ ID NO: 8916 - DNA, 20 bp, Artificial Sequence
  Description of Artificial Sequence: Synthetic oligonucleotide
gtctcaggagccaggcatat

SEQ ID NO: 8917 - DNA, 20 bp, Artificial Sequence
  Description of Artificial Sequence: Synthetic oligonucleotide
tctcaggagccaggcatatc

SEQ ID NO: 8918 - DNA, 20 bp, Artificial Sequence
  Description of Artificial Sequence: Synthetic oligonucleotide
ctcaggagccaggcatatct

SEQ ID NO: 8919 - DNA, 20 bp, Artificial Sequence
  Description of Artificial Sequence: Synthetic oligonucleotide
tcaggagccaggcatatctg

SEQ ID NO: 8920 - DNA, 20 bp, Artificial Sequence
  Description of Artificial Sequence: Synthetic oligonucleotide
caggagccaggcatatctgg

SEQ ID NO: 8921 - DNA, 20 bp, Artificial Sequence
  Description of Artificial Sequence: Synthetic oligonucleotide
aggagccaggcatatctggg

SEQ ID NO: 8922 - DNA, 20 bp, Artificial Sequence
  Description of Artificial Sequence: Synthetic oligonucleotide
ggagccaggcatatctgggg

SEQ ID NO: 8923 - DNA, 20 bp, Artificial Sequence
  Description of Artificial Sequence: Synthetic oligonucleotide
gagccaggcatatctggggg

SEQ ID NO: 8924 - DNA, 20 bp, Artificial Sequence
  Description of Artificial Sequence: Synthetic oligonucleotide
agccaggcatatctgggggc

SEQ ID NO: 8925 - DNA, 20 bp, Artificial Sequence
  Description of Artificial Sequence: Synthetic oligonucleotide
gccaggcatatctgggggct

SEQ ID NO: 8926 - DNA, 20 bp, Artificial Sequence
  Description of Artificial Sequence: Synthetic oligonucleotide
ccaggcatatctgggggctt

SEQ ID NO: 8927 - DNA, 20 bp, Artificial Sequence
  Description of Artificial Sequence: Synthetic oligonucleotide
caggcatatctgggggctta

SEQ ID NO: 8928 - DNA, 20 bp, Artificial Sequence
  Description of Artificial Sequence: Synthetic oligonucleotide
aggcatatctgggggcttaa

SEQ ID NO: 8929 - DNA, 20 bp, Artificial Sequence
  Description of Artificial Sequence: Synthetic oligonucleotide
ggcatatctgggggcttaac

SEQ ID NO: 8930 - DNA, 20 bp, Artificial Sequence
  Description of Artificial Sequence: Synthetic oligonucleotide
gcatatctgggggcttaaca

SEQ ID NO: 8931 - DNA, 20 bp, Artificial Sequence
  Description of Artificial Sequence: Synthetic oligonucleotide
catatctgggggcttaacag

SEQ ID NO: 8932 - DNA, 20 bp, Artificial Sequence
  Description of Artificial Sequence: Synthetic oligonucleotide
atatctgggggcttaacagt

SEQ ID NO: 8933 - DNA, 20 bp, Artificial Sequence
  Description of Artificial Sequence: Synthetic oligonucleotide
tatctgggggcttaacagtg

SEQ ID NO: 8934 - DNA, 20 bp, Artificial Sequence
  Description of Artificial Sequence: Synthetic oligonucleotide
atctgggggcttaacagtgg

SEQ ID NO: 8935 - DNA, 20 bp, Artificial Sequence
  Description of Artificial Sequence: Synthetic oligonucleotide
tctgggggcttaacagtgga

SEQ ID NO: 8936 - DNA, 20 bp, Artificial Sequence
  Description of Artificial Sequence: Synthetic oligonucleotide
ctgggggcttaacagtggat

SEQ ID NO: 8937 - DNA, 20 bp, Artificial Sequence
  Description of Artificial Sequence: Synthetic oligonucleotide
tgggggcttaacagtggatg

SEQ ID NO: 8938 - DNA, 20 bp, Artificial Sequence
  Description of Artificial Sequence: Synthetic oligonucleotide
gggggcttaacagtggatga

SEQ ID NO: 8939 - DNA, 20 bp, Artificial Sequence
  Description of Artificial Sequence: Synthetic oligonucleotide
ggggcttaacagtggatgac

SEQ ID NO: 8940 - DNA, 20 bp, Artificial Sequence
  Description of Artificial Sequence: Synthetic oligonucleotide
gggcttaacagtggatgacc

SEQ ID NO: 8941 - DNA, 20 bp, Artificial Sequence
  Description of Artificial Sequence: Synthetic oligonucleotide
ggcttaacagtggatgacca

SEQ ID NO: 8942 - DNA, 20 bp, Artificial Sequence
  Description of Artificial Sequence: Synthetic oligonucleotide
gcttaacagtggatgaccag

SEQ ID NO: 8943 - DNA, 20 bp, Artificial Sequence
  Description of Artificial Sequence: Synthetic oligonucleotide
cttaacagtggatgaccagg

SEQ ID NO: 8944 - DNA, 20 bp, Artificial Sequence
  Description of Artificial Sequence: Synthetic oligonucleotide
ttaacagtggatgaccaggg

SEQ ID NO: 8945 - DNA, 20 bp, Artificial Sequence
  Description of Artificial Sequence: Synthetic oligonucleotide
taacagtggatgaccaggga

SEQ ID NO: 8946 - DNA, 20 bp, Artificial Sequence
  Description of Artificial Sequence: Synthetic oligonucleotide
aacagtggatgaccagggaa

SEQ ID NO: 8947 - DNA, 20 bp, Artificial Sequence
  Description of Artificial Sequence: Synthetic oligonucleotide
acagtggatgaccagggaag

SEQ ID NO: 8948 - DNA, 20 bp, Artificial Sequence
  Description of Artificial Sequence: Synthetic oligonucleotide
cagtggatgaccagggaagt

SEQ ID NO: 8949 - DNA, 20 bp, Artificial Sequence
  Description of Artificial Sequence: Synthetic oligonucleotide
agtggatgaccagggaagta

SEQ ID NO: 8950 - DNA, 20 bp, Artificial Sequence
  Description of Artificial Sequence: Synthetic oligonucleotide
gtggatgaccagggaagtaa

SEQ ID NO: 8951 - DNA, 20 bp, Artificial Sequence
  Description of Artificial Sequence: Synthetic oligonucleotide
tggatgaccagggaagtaaa

SEQ ID NO: 8952 - DNA, 20 bp, Artificial Sequence
  Description of Artificial Sequence: Synthetic oligonucleotide
ggatgaccagggaagtaaaa

SEQ ID NO: 8953 - DNA, 20 bp, Artificial Sequence
  Description of Artificial Sequence: Synthetic oligonucleotide
gatgaccagggaagtaaaag

SEQ ID NO: 8954 - DNA, 20 bp, Artificial Sequence
  Description of Artificial Sequence: Synthetic oligonucleotide
atgaccagggaagtaaaagg

SEQ ID NO: 8955 - DNA, 20 bp, Artificial Sequence
  Description of Artificial Sequence: Synthetic oligonucleotide
tgaccagggaagtaaaaggc

SEQ ID NO: 8956 - DNA, 20 bp, Artificial Sequence
  Description of Artificial Sequence: Synthetic oligonucleotide
gaccagggaagtaaaaggca

SEQ ID NO: 8957 - DNA, 20 bp, Artificial Sequence
  Description of Artificial Sequence: Synthetic oligonucleotide
accagggaagtaaaaggcaa

SEQ ID NO: 8958 - DNA, 20 bp, Artificial Sequence
  Description of Artificial Sequence: Synthetic oligonucleotide
ccagggaagtaaaaggcaaa

SEQ ID NO: 8959 - DNA, 20 bp, Artificial Sequence
  Description of Artificial Sequence: Synthetic oligonucleotide
cagggaagtaaaaggcaaat

SEQ ID NO: 8960 - DNA, 20 bp, Artificial Sequence
  Description of Artificial Sequence: Synthetic oligonucleotide
agggaagtaaaaggcaaatc

SEQ ID NO: 8961 - DNA, 20 bp, Artificial Sequence
  Description of Artificial Sequence: Synthetic oligonucleotide
gggaagtaaaaggcaaatct

SEQ ID NO: 8962 - DNA, 20 bp, Artificial Sequence
  Description of Artificial Sequence: Synthetic oligonucleotide
ggaagtaaaaggcaaatctt

SEQ ID NO: 8963 - DNA, 20 bp, Artificial Sequence
  Description of Artificial Sequence: Synthetic oligonucleotide
gaagtaaaaggcaaatctta

SEQ ID NO: 8964 - DNA, 20 bp, Artificial Sequence
  Description of Artificial Sequence: Synthetic oligonucleotide
aagtaaaaggcaaatcttat

SEQ ID NO: 8965 - DNA, 20 bp, Artificial Sequence
  Description of Artificial Sequence: Synthetic oligonucleotide
agtaaaaggcaaatcttatc

SEQ ID NO: 8966 - DNA, 20 bp, Artificial Sequence
  Description of Artificial Sequence: Synthetic oligonucleotide
gtaaaaggcaaatcttatct

SEQ ID NO: 8967 - DNA, 20 bp, Artificial Sequence
  Description of Artificial Sequence: Synthetic oligonucleotide
taaaaggcaaatcttatctc

SEQ ID NO: 8968 - DNA, 20 bp, Artificial Sequence
  Description of Artificial Sequence: Synthetic oligonucleotide
aaaaggcaaatcttatctca

SEQ ID NO: 8969 - DNA, 20 bp, Artificial Sequence
  Description of Artificial Sequence: Synthetic oligonucleotide
aaaggcaaatcttatctcat

SEQ ID NO: 8970 - DNA, 20 bp, Artificial Sequence
  Description of Artificial Sequence: Synthetic oligonucleotide
aaggcaaatcttatctcatg

SEQ ID NO: 8971 - DNA, 20 bp, Artificial Sequence
  Description of Artificial Sequence: Synthetic oligonucleotide
aggcaaatcttatctcatga

SEQ ID NO: 8972 - DNA, 20 bp, Artificial Sequence
  Description of Artificial Sequence: Synthetic oligonucleotide
ggcaaatcttatctcatgac

SEQ ID NO: 8973 - DNA, 20 bp, Artificial Sequence
  Description of Artificial Sequence: Synthetic oligonucleotide
gcaaatcttatctcatgacc

SEQ ID NO: 8974 - DNA, 20 bp, Artificial Sequence
  Description of Artificial Sequence: Synthetic oligonucleotide
caaatcttatctcatgacca

SEQ ID NO: 8975 - DNA, 20 bp, Artificial Sequence
  Description of Artificial Sequence: Synthetic oligonucleotide
aaatcttatctcatgaccac

SEQ ID NO: 8976 - DNA, 20 bp, Artificial Sequence
  Description of Artificial Sequence: Synthetic oligonucleotide
aatcttatctcatgaccacc

SEQ ID NO: 8977 - DNA, 20 bp, Artificial Sequence
  Description of Artificial Sequence: Synthetic oligonucleotide
atcttatctcatgaccacct

SEQ ID NO: 8978 - DNA, 20 bp, Artificial Sequence
  Description of Artificial Sequence: Synthetic oligonucleotide
tcttatctcatgaccacctc

SEQ ID NO: 8979 - DNA, 20 bp, Artificial Sequence
  Description of Artificial Sequence: Synthetic oligonucleotide
cttatctcatgaccacctct

SEQ ID NO: 8980 - DNA, 20 bp, Artificial Sequence
  Description of Artificial Sequence: Synthetic oligonucleotide
ttatctcatgaccacctctc

SEQ ID NO: 8981 - DNA, 20 bp, Artificial Sequence
  Description of Artificial Sequence: Synthetic oligonucleotide
tatctcatgaccacctctct

SEQ ID NO: 8982 - DNA, 20 bp, Artificial Sequence
  Description of Artificial Sequence: Synthetic oligonucleotide
atctcatgaccacctctctg

SEQ ID NO: 8983 - DNA, 20 bp, Artificial Sequence
  Description of Artificial Sequence: Synthetic oligonucleotide
tctcatgaccacctctctgc

SEQ ID NO: 8984 - DNA, 20 bp, Artificial Sequence
  Description of Artificial Sequence: Synthetic oligonucleotide
ctcatgaccacctctctgcc

SEQ ID NO: 8985 - DNA, 20 bp, Artificial Sequence
  Description of Artificial Sequence: Synthetic oligonucleotide
tcatgaccacctctctgcca

SEQ ID NO: 8986 - DNA, 20 bp, Artificial Sequence
  Description of Artificial Sequence: Synthetic oligonucleotide
catgaccacctctctgccat

SEQ ID NO: 8987 - DNA, 20 bp, Artificial Sequence
  Description of Artificial Sequence: Synthetic oligonucleotide
atgaccacctctctgccatc

SEQ ID NO: 8988 - DNA, 20 bp, Artificial Sequence
  Description of Artificial Sequence: Synthetic oligonucleotide
tgaccacctctctgccatct

SEQ ID NO: 8989 - DNA, 20 bp, Artificial Sequence
  Description of Artificial Sequence: Synthetic oligonucleotide
gaccacctctctgccatctg

SEQ ID NO: 8990 - DNA, 20 bp, Artificial Sequence
  Description of Artificial Sequence: Synthetic oligonucleotide
accacctctctgccatctgc

SEQ ID NO: 8991 - DNA, 20 bp, Artificial Sequence
  Description of Artificial Sequence: Synthetic oligonucleotide
ccacctctctgccatctgcc

SEQ ID NO: 8992 - DNA, 20 bp, Artificial Sequence
  Description of Artificial Sequence: Synthetic oligonucleotide
cacctctctgccatctgcct

SEQ ID NO: 8993 - DNA, 20 bp, Artificial Sequence
  Description of Artificial Sequence: Synthetic oligonucleotide
acctctctgccatctgccta

SEQ ID NO: 8994 - DNA, 20 bp, Artificial Sequence
  Description of Artificial Sequence: Synthetic oligonucleotide
cctctctgccatctgcctaa

SEQ ID NO: 8995 - DNA, 20 bp, Artificial Sequence
  Description of Artificial Sequence: Synthetic oligonucleotide
ctctctgccatctgcctaac

SEQ ID NO: 8996 - DNA, 20 bp, Artificial Sequence
  Description of Artificial Sequence: Synthetic oligonucleotide
tctctgccatctgcctaacc

SEQ ID NO: 8997 - DNA, 20 bp, Artificial Sequence
  Description of Artificial Sequence: Synthetic oligonucleotide
ctctgccatctgcctaacct

SEQ ID NO: 8998 - DNA, 20 bp, Artificial Sequence
  Description of Artificial Sequence: Synthetic oligonucleotide
tctgccatctgcctaacctc

SEQ ID NO: 8999 - DNA, 20 bp, Artificial Sequence
  Description of Artificial Sequence: Synthetic oligonucleotide
ctgccatctgcctaacctct

SEQ ID NO: 9000 - DNA, 20 bp, Artificial Sequence
  Description of Artificial Sequence: Synthetic oligonucleotide
tgccatctgcctaacctctt

SEQ ID NO: 9001 - DNA, 20 bp, Artificial Sequence
  Description of Artificial Sequence: Synthetic oligonucleotide
gccatctgcctaacctcttc

SEQ ID NO: 9002 - DNA, 20 bp, Artificial Sequence
  Description of Artificial Sequence: Synthetic oligonucleotide
ccatctgcctaacctcttcc

SEQ ID NO: 9003 - DNA, 20 bp, Artificial Sequence
  Description of Artificial Sequence: Synthetic oligonucleotide
catctgcctaacctcttcca

SEQ ID NO: 9004 - DNA, 20 bp, Artificial Sequence
  Description of Artificial Sequence: Synthetic oligonucleotide
atctgcctaacctcttccat

SEQ ID NO: 9005 - DNA, 20 bp, Artificial Sequence
  Description of Artificial Sequence: Synthetic oligonucleotide
tctgcctaacctcttccatg

SEQ ID NO: 9006 - DNA, 20 bp, Artificial Sequence
  Description of Artificial Sequence: Synthetic oligonucleotide
ctgcctaacctcttccatgg

SEQ ID NO: 9007 - DNA, 20 bp, Artificial Sequence
  Description of Artificial Sequence: Synthetic oligonucleotide
tgcctaacctcttccatggc

SEQ ID NO: 9008 - DNA, 20 bp, Artificial Sequence
  Description of Artificial Sequence: Synthetic oligonucleotide
gcctaacctcttccatggct

SEQ ID NO: 9009 - DNA, 20 bp, Artificial Sequence
  Description of Artificial Sequence: Synthetic oligonucleotide
cctaacctcttccatggctc

SEQ ID NO: 9010 - DNA, 20 bp, Artificial Sequence
  Description of Artificial Sequence: Synthetic oligonucleotide
ctaacctcttccatggctcc

SEQ ID NO: 9011 - DNA, 20 bp, Artificial Sequence
  Description of Artificial Sequence: Synthetic oligonucleotide
taacctcttccatggctccc

SEQ ID NO: 9012 - DNA, 20 bp, Artificial Sequence
  Description of Artificial Sequence: Synthetic oligonucleotide
aacctcttccatggctccct

SEQ ID NO: 9013 - DNA, 20 bp, Artificial Sequence
  Description of Artificial Sequence: Synthetic oligonucleotide
acctcttccatggctcccta

SEQ ID NO: 9014 - DNA, 20 bp, Artificial Sequence
  Description of Artificial Sequence: Synthetic oligonucleotide
cctcttccatggctccctat

SEQ ID NO: 9015 - DNA, 20 bp, Artificial Sequence
  Description of Artificial Sequence: Synthetic oligonucleotide
ctcttccatggctccctatg

SEQ ID NO: 9016 - DNA, 20 bp, Artificial Sequence
  Description of Artificial Sequence: Synthetic oligonucleotide
tcttccatggctccctatgt

SEQ ID NO: 9017 - DNA, 20 bp, Artificial Sequence
  Description of Artificial Sequence: Synthetic oligonucleotide
cttccatggctccctatgtc

SEQ ID NO: 9018 - DNA, 20 bp, Artificial Sequence
  Description of Artificial Sequence: Synthetic oligonucleotide
ttccatggctccctatgtcc

SEQ ID NO: 9019 - DNA, 20 bp, Artificial Sequence
  Description of Artificial Sequence: Synthetic oligonucleotide
tccatggctccctatgtcct

SEQ ID NO: 9020 - DNA, 20 bp, Artificial Sequence
  Description of Artificial Sequence: Synthetic oligonucleotide
ccatggctccctatgtcctt

SEQ ID NO: 9021 - DNA, 20 bp, Artificial Sequence
  Description of Artificial Sequence: Synthetic oligonucleotide
catggctccctatgtccttc

SEQ ID NO: 9022 - DNA, 20 bp, Artificial Sequence
  Description of Artificial Sequence: Synthetic oligonucleotide
atggctccctatgtccttcc

SEQ ID NO: 9023 - DNA, 20 bp, Artificial Sequence
  Description of Artificial Sequence: Synthetic oligonucleotide
tggctccctatgtccttcct

SEQ ID NO: 9024 - DNA, 20 bp, Artificial Sequence
  Description of Artificial Sequence: Synthetic oligonucleotide
ggctccctatgtccttcctc

SEQ ID NO: 9025 - DNA, 20 bp, Artificial Sequence
  Description of Artificial Sequence: Synthetic oligonucleotide
gctccctatgtccttcctca

SEQ ID NO: 9026 - DNA, 20 bp, Artificial Sequence
  Description of Artificial Sequence: Synthetic oligonucleotide
ctccctatgtccttcctcag

SEQ ID NO: 9027 - DNA, 20 bp, Artificial Sequence
  Description of Artificial Sequence: Synthetic oligonucleotide
tccctatgtccttcctcagc

SEQ ID NO: 9028 - DNA, 20 bp, Artificial Sequence
  Description of Artificial Sequence: Synthetic oligonucleotide
ccctatgtccttcctcagca

SEQ ID NO: 9029 - DNA, 20 bp, Artificial Sequence
  Description of Artificial Sequence: Synthetic oligonucleotide
cctatgtccttcctcagcat

SEQ ID NO: 9030 - DNA, 20 bp, Artificial Sequence
  Description of Artificial Sequence: Synthetic oligonucleotide
ctatgtccttcctcagcatg

SEQ ID NO: 9031 - DNA, 20 bp, Artificial Sequence
  Description of Artificial Sequence: Synthetic oligonucleotide
tatgtccttcctcagcatgg

SEQ ID NO: 9032 - DNA, 20 bp, Artificial Sequence
  Description of Artificial Sequence: Synthetic oligonucleotide
atgtccttcctcagcatggt

SEQ ID NO: 9033 - DNA, 20 bp, Artificial Sequence
  Description of Artificial Sequence: Synthetic oligonucleotide
tgtccttcctcagcatggtc

SEQ ID NO: 9034 - DNA, 20 bp, Artificial Sequence
  Description of Artificial Sequence: Synthetic oligonucleotide
gtccttcctcagcatggtcc

SEQ ID NO: 9035 - DNA, 20 bp, Artificial Sequence
  Description of Artificial Sequence: Synthetic oligonucleotide
tccttcctcagcatggtcca

SEQ ID NO: 9036 - DNA, 20 bp, Artificial Sequence
  Description of Artificial Sequence: Synthetic oligonucleotide
ccttcctcagcatggtccac

SEQ ID NO: 9037 - DNA, 20 bp, Artificial Sequence
  Description of Artificial Sequence: Synthetic oligonucleotide
cttcctcagcatggtccaca

SEQ ID NO: 9038 - DNA, 20 bp, Artificial Sequence
  Description of Artificial Sequence: Synthetic oligonucleotide
ttcctcagcatggtccacaa

SEQ ID NO: 9039 - DNA, 20 bp, Artificial Sequence
  Description of Artificial Sequence: Synthetic oligonucleotide
tcctcagcatggtccacaag

SEQ ID NO: 9040 - DNA, 20 bp, Artificial Sequence
  Description of Artificial Sequence: Synthetic oligonucleotide
cctcagcatggtccacaagg

SEQ ID NO: 9041 - DNA, 20 bp, Artificial Sequence
  Description of Artificial Sequence: Synthetic oligonucleotide
ctcagcatggtccacaaggc

SEQ ID NO: 9042 - DNA, 20 bp, Artificial Sequence
  Description of Artificial Sequence: Synthetic oligonucleotide
tcagcatggtccacaaggca

SEQ ID NO: 9043 - DNA, 20 bp, Artificial Sequence
  Description of Artificial Sequence: Synthetic oligonucleotide
cagcatggtccacaaggcac

SEQ ID NO: 9044 - DNA, 20 bp, Artificial Sequence
  Description of Artificial Sequence: Synthetic oligonucleotide
agcatggtccacaaggcacc

SEQ ID NO: 9045 - DNA, 20 bp, Artificial Sequence
  Description of Artificial Sequence: Synthetic oligonucleotide
gcatggtccacaaggcacct

SEQ ID NO: 9046 - DNA, 20 bp, Artificial Sequence
  Description of Artificial Sequence: Synthetic oligonucleotide
catggtccacaaggcacctg

SEQ ID NO: 9047 - DNA, 20 bp, Artificial Sequence
  Description of Artificial Sequence: Synthetic oligonucleotide
atggtccacaaggcacctgg

SEQ ID NO: 9048 - DNA, 20 bp, Artificial Sequence
  Description of Artificial Sequence: Synthetic oligonucleotide
tggtccacaaggcacctgga

SEQ ID NO: 9049 - DNA, 20 bp, Artificial Sequence
  Description of Artificial Sequence: Synthetic oligonucleotide
ggtccacaaggcacctggag

SEQ ID NO: 9050 - DNA, 20 bp, Artificial Sequence
  Description of Artificial Sequence: Synthetic oligonucleotide
gtccacaaggcacctggagg

SEQ ID NO: 9051 - DNA, 20 bp, Artificial Sequence
  Description of Artificial Sequence: Synthetic oligonucleotide
tccacaaggcacctggagga

SEQ ID NO: 9052 - DNA, 20 bp, Artificial Sequence
  Description of Artificial Sequence: Synthetic oligonucleotide
ccacaaggcacctggaggac

SEQ ID NO: 9053 - DNA, 20 bp, Artificial Sequence
  Description of Artificial Sequence: Synthetic oligonucleotide
cacaaggcacctggaggacc

SEQ ID NO: 9054 - DNA, 20 bp, Artificial Sequence
  Description of Artificial Sequence: Synthetic oligonucleotide
acaaggcacctggaggacca

SEQ ID NO: 9055 - DNA, 20 bp, Artificial Sequence
  Description of Artificial Sequence: Synthetic oligonucleotide
caaggcacctggaggaccag

SEQ ID NO: 9056 - DNA, 20 bp, Artificial Sequence
  Description of Artificial Sequence: Synthetic oligonucleotide
aaggcacctggaggaccagc

SEQ ID NO: 9057 - DNA, 20 bp, Artificial Sequence
  Description of Artificial Sequence: Synthetic oligonucleotide
aggcacctggaggaccagcc

SEQ ID NO: 9058 - DNA, 20 bp, Artificial Sequence
  Description of Artificial Sequence: Synthetic oligonucleotide
ggcacctggaggaccagccc

SEQ ID NO: 9059 - DNA, 20 bp, Artificial Sequence
  Description of Artificial Sequence: Synthetic oligonucleotide
gcacctggaggaccagcccc

SEQ ID NO: 9060 - DNA, 20 bp, Artificial Sequence
  Description of Artificial Sequence: Synthetic oligonucleotide
cacctggaggaccagccccc

SEQ ID NO: 9061 - DNA, 20 bp, Artificial Sequence
  Description of Artificial Sequence: Synthetic oligonucleotide
acctggaggaccagcccccg

SEQ ID NO: 9062 - DNA, 20 bp, Artificial Sequence
  Description of Artificial Sequence: Synthetic oligonucleotide
cctggaggaccagcccccgt

SEQ ID NO: 9063 - DNA, 20 bp, Artificial Sequence
  Description of Artificial Sequence: Synthetic oligonucleotide
ctggaggaccagcccccgtg

SEQ ID NO: 9064 - DNA, 20 bp, Artificial Sequence
  Description of Artificial Sequence: Synthetic oligonucleotide
tggaggaccagcccccgtgc

SEQ ID NO: 9065 - DNA, 20 bp, Artificial Sequence
  Description of Artificial Sequence: Synthetic oligonucleotide
ggaggaccagcccccgtgcc

SEQ ID NO: 9066 - DNA, 20 bp, Artificial Sequence
  Description of Artificial Sequence: Synthetic oligonucleotide
gaggaccagcccccgtgccc

SEQ ID NO: 9067 - DNA, 20 bp, Artificial Sequence
  Description of Artificial Sequence: Synthetic oligonucleotide
aggaccagcccccgtgccca

SEQ ID NO: 9068 - DNA, 20 bp, Artificial Sequence
  Description of Artificial Sequence: Synthetic oligonucleotide
ggaccagcccccgtgcccat

SEQ ID NO: 9069 - DNA, 20 bp, Artificial Sequence
  Description of Artificial Sequence: Synthetic oligonucleotide
gaccagcccccgtgcccatc

SEQ ID NO: 9070 - DNA, 20 bp, Artificial Sequence
  Description of Artificial Sequence: Synthetic oligonucleotide
accagcccccgtgcccatcc

SEQ ID NO: 9071 - DNA, 20 bp, Artificial Sequence
  Description of Artificial Sequence: Synthetic oligonucleotide
ccagcccccgtgcccatcct

SEQ ID NO: 9072 - DNA, 20 bp, Artificial Sequence
  Description of Artificial Sequence: Synthetic oligonucleotide
cagcccccgtgcccatcctc

SEQ ID NO: 9073 - DNA, 20 bp, Artificial Sequence
  Description of Artificial Sequence: Synthetic oligonucleotide
agcccccgtgcccatcctcc

SEQ ID NO: 9074 - DNA, 20 bp, Artificial Sequence
  Description of Artificial Sequence: Synthetic oligonucleotide
gcccccgtgcccatcctcct

SEQ ID NO: 9075 - DNA, 20 bp, Artificial Sequence
  Description of Artificial Sequence: Synthetic oligonucleotide
cccccgtgcccatcctcctc

SEQ ID NO: 9076 - DNA, 20 bp, Artificial Sequence
  Description of Artificial Sequence: Synthetic oligonucleotide
ccccgtgcccatcctcctcc

SEQ ID NO: 9077 - DNA, 20 bp, Artificial Sequence
  Description of Artificial Sequence: Synthetic oligonucleotide
cccgtgcccatcctcctcct

SEQ ID NO: 9078 - DNA, 20 bp, Artificial Sequence
  Description of Artificial Sequence: Synthetic oligonucleotide
ccgtgcccatcctcctcctg

SEQ ID NO: 9079 - DNA, 20 bp, Artificial Sequence
  Description of Artificial Sequence: Synthetic oligonucleotide
cgtgcccatcctcctcctgc

SEQ ID NO: 9080 - DNA, 20 bp, Artificial Sequence
  Description of Artificial Sequence: Synthetic oligonucleotide
gtgcccatcctcctcctgcc

SEQ ID NO: 9081 - DNA, 20 bp, Artificial Sequence
  Description of Artificial Sequence: Synthetic oligonucleotide
tgcccatcctcctcctgcca

SEQ ID NO: 9082 - DNA, 20 bp, Artificial Sequence
  Description of Artificial Sequence: Synthetic oligonucleotide
gcccatcctcctcctgccat

SEQ ID NO: 9083 - DNA, 20 bp, Artificial Sequence
  Description of Artificial Sequence: Synthetic oligonucleotide
cccatcctcctcctgccatg

SEQ ID NO: 9084 - DNA, 20 bp, Artificial Sequence
  Description of Artificial Sequence: Synthetic oligonucleotide
ccatcctcctcctgccatgc

SEQ ID NO: 9085 - DNA, 20 bp, Artificial Sequence
  Description of Artificial Sequence: Synthetic oligonucleotide
catcctcctcctgccatgct

SEQ ID NO: 9086 - DNA, 20 bp, Artificial Sequence
  Description of Artificial Sequence: Synthetic oligonucleotide
atcctcctcctgccatgctg

SEQ ID NO: 9087 - DNA, 20 bp, Artificial Sequence
  Description of Artificial Sequence: Synthetic oligonucleotide
tcctcctcctgccatgctgt

SEQ ID NO: 9088 - DNA, 20 bp, Artificial Sequence
  Description of Artificial Sequence: Synthetic oligonucleotide
cctcctcctgccatgctgta

SEQ ID NO: 9089 - DNA, 20 bp, Artificial Sequence
  Description of Artificial Sequence: Synthetic oligonucleotide
ctcctcctgccatgctgtac

SEQ ID NO: 9090 - DNA, 20 bp, Artificial Sequence
  Description of Artificial Sequence: Synthetic oligonucleotide
tcctcctgccatgctgtacc

SEQ ID NO: 9091 - DNA, 20 bp, Artificial Sequence
  Description of Artificial Sequence: Synthetic oligonucleotide
cctcctgccatgctgtaccc

SEQ ID NO: 9092 - DNA, 20 bp, Artificial Sequence
  Description of Artificial Sequence: Synthetic oligonucleotide
ctcctgccatgctgtaccca

SEQ ID NO: 9093 - DNA, 20 bp, Artificial Sequence
  Description of Artificial Sequence: Synthetic oligonucleotide
tcctgccatgctgtacccac

SEQ ID NO: 9094 - DNA, 20 bp, Artificial Sequence
  Description of Artificial Sequence: Synthetic oligonucleotide
cctgccatgctgtacccaca

SEQ ID NO: 9095 - DNA, 20 bp, Artificial Sequence
  Description of Artificial Sequence: Synthetic oligonucleotide
ctgccatgctgtacccacac

SEQ ID NO: 9096 - DNA, 20 bp, Artificial Sequence
  Description of Artificial Sequence: Synthetic oligonucleotide
tgccatgctgtacccacacc

SEQ ID NO: 9097 - DNA, 20 bp, Artificial Sequence
  Description of Artificial Sequence: Synthetic oligonucleotide
gccatgctgtacccacaccc

SEQ ID NO: 9098 - DNA, 20 bp, Artificial Sequence
  Description of Artificial Sequence: Synthetic oligonucleotide
ccatgctgtacccacaccct

SEQ ID NO: 9099 - DNA, 20 bp, Artificial Sequence
  Description of Artificial Sequence: Synthetic oligonucleotide
catgctgtacccacaccctc

SEQ ID NO: 9100 - DNA, 20 bp, Artificial Sequence
  Description of Artificial Sequence: Synthetic oligonucleotide
atgctgtacccacaccctct

SEQ ID NO: 9101 - DNA, 20 bp, Artificial Sequence
  Description of Artificial Sequence: Synthetic oligonucleotide
tgctgtacccacaccctctc

SEQ ID NO: 9102 - DNA, 20 bp, Artificial Sequence
  Description of Artificial Sequence: Synthetic oligonucleotide
gctgtacccacaccctctct

SEQ ID NO: 9103 - DNA, 20 bp, Artificial Sequence
  Description of Artificial Sequence: Synthetic oligonucleotide
ctgtacccacaccctctctg

SEQ ID NO: 9104 - DNA, 20 bp, Artificial Sequence
  Description of Artificial Sequence: Synthetic oligonucleotide
tgtacccacaccctctctgg

SEQ ID NO: 9105 - DNA, 20 bp, Artificial Sequence
  Description of Artificial Sequence: Synthetic oligonucleotide
gtacccacaccctctctggc

SEQ ID NO: 9106 - DNA, 20 bp, Artificial Sequence
  Description of Artificial Sequence: Synthetic oligonucleotide
tacccacaccctctctggca

SEQ ID NO: 9107 - DNA, 20 bp, Artificial Sequence
  Description of Artificial Sequence: Synthetic oligonucleotide
acccacaccctctctggcac

SEQ ID NO: 9108 - DNA, 20 bp, Artificial Sequence
  Description of Artificial Sequence: Synthetic oligonucleotide
cccacaccctctctggcaca

SEQ ID NO: 9109 - DNA, 20 bp, Artificial Sequence
  Description of Artificial Sequence: Synthetic oligonucleotide
ccacaccctctctggcacac

SEQ ID NO: 9110 - DNA, 20 bp, Artificial Sequence
  Description of Artificial Sequence: Synthetic oligonucleotide
cacaccctctctggcacaca

SEQ ID NO: 9111 - DNA, 20 bp, Artificial Sequence
  Description of Artificial Sequence: Synthetic oligonucleotide
acaccctctctggcacacag

SEQ ID NO: 9112 - DNA, 20 bp, Artificial Sequence
  Description of Artificial Sequence: Synthetic oligonucleotide
caccctctctggcacacagg

SEQ ID NO: 9113 - DNA, 20 bp, Artificial Sequence
  Description of Artificial Sequence: Synthetic oligonucleotide
accctctctggcacacaggc

SEQ ID NO: 9114 - DNA, 20 bp, Artificial Sequence
  Description of Artificial Sequence: Synthetic oligonucleotide
ccctctctggcacacaggct

SEQ ID NO: 9115 - DNA, 20 bp, Artificial Sequence
  Description of Artificial Sequence: Synthetic oligonucleotide
cctctctggcacacaggctt

SEQ ID NO: 9116 - DNA, 20 bp, Artificial Sequence
  Description of Artificial Sequence: Synthetic oligonucleotide
ctctctggcacacaggcttt

SEQ ID NO: 9117 - DNA, 20 bp, Artificial Sequence
  Description of Artificial Sequence: Synthetic oligonucleotide
tctctggcacacaggctttc

SEQ ID NO: 9118 - DNA, 20 bp, Artificial Sequence
  Description of Artificial Sequence: Synthetic oligonucleotide
ctctggcacacaggctttct

SEQ ID NO: 9119 - DNA, 20 bp, Artificial Sequence
  Description of Artificial Sequence: Synthetic oligonucleotide
tctggcacacaggctttctt

SEQ ID NO: 9120 - DNA, 20 bp, Artificial Sequence
  Description of Artificial Sequence: Synthetic oligonucleotide
ctggcacacaggctttcttc

SEQ ID NO: 9121 - DNA, 20 bp, Artificial Sequence
  Description of Artificial Sequence: Synthetic oligonucleotide
tggcacacaggctttcttcc

SEQ ID NO: 9122 - DNA, 20 bp, Artificial Sequence
  Description of Artificial Sequence: Synthetic oligonucleotide
ggcacacaggctttcttccc

SEQ ID NO: 9123 - DNA, 20 bp, Artificial Sequence
  Description of Artificial Sequence: Synthetic oligonucleotide
gcacacaggctttcttccca

SEQ ID NO: 9124 - DNA, 20 bp, Artificial Sequence
  Description of Artificial Sequence: Synthetic oligonucleotide
cacacaggctttcttcccac

SEQ ID NO: 9125 - DNA, 20 bp, Artificial Sequence
  Description of Artificial Sequence: Synthetic oligonucleotide
acacaggctttcttcccacc

SEQ ID NO: 9126 - DNA, 20 bp, Artificial Sequence
  Description of Artificial Sequence: Synthetic oligonucleotide
cacaggctttcttcccaccc

SEQ ID NO: 9127 - DNA, 20 bp, Artificial Sequence
  Description of Artificial Sequence: Synthetic oligonucleotide
acaggctttcttcccaccct

SEQ ID NO: 9128 - DNA, 20 bp, Artificial Sequence
  Description of Artificial Sequence: Synthetic oligonucleotide
caggctttcttcccaccctt

SEQ ID NO: 9129 - DNA, 20 bp, Artificial Sequence
  Description of Artificial Sequence: Synthetic oligonucleotide
aggctttcttcccacccttg

SEQ ID NO: 9130 - DNA, 20 bp, Artificial Sequence
  Description of Artificial Sequence: Synthetic oligonucleotide
ggctttcttcccacccttgt

SEQ ID NO: 9131 - DNA, 20 bp, Artificial Sequence
  Description of Artificial Sequence: Synthetic oligonucleotide
gctttcttcccacccttgta

SEQ ID NO: 9132 - DNA, 20 bp, Artificial Sequence
  Description of Artificial Sequence: Synthetic oligonucleotide
ctttcttcccacccttgtac

SEQ ID NO: 9133 - DNA, 20 bp, Artificial Sequence
  Description of Artificial Sequence: Synthetic oligonucleotide
tttcttcccacccttgtacc

SEQ ID NO: 9134 - DNA, 20 bp, Artificial Sequence
  Description of Artificial Sequence: Synthetic oligonucleotide
ttcttcccacccttgtacca

SEQ ID NO: 9135 - DNA, 20 bp, Artificial Sequence
  Description of Artificial Sequence: Synthetic oligonucleotide
tcttcccacccttgtaccac

SEQ ID NO: 9136 - DNA, 20 bp, Artificial Sequence
  Description of Artificial Sequence: Synthetic oligonucleotide
cttcccacccttgtaccaca

SEQ ID NO: 9137 - DNA, 20 bp, Artificial Sequence
  Description of Artificial Sequence: Synthetic oligonucleotide
ttcccacccttgtaccacac

SEQ ID NO: 9138 - DNA, 20 bp, Artificial Sequence
  Description of Artificial Sequence: Synthetic oligonucleotide
tcccacccttgtaccacaca

SEQ ID NO: 9139 - DNA, 20 bp, Artificial Sequence
  Description of Artificial Sequence: Synthetic oligonucleotide
cccacccttgtaccacacac

SEQ ID NO: 9140 - DNA, 20 bp, Artificial Sequence
  Description of Artificial Sequence: Synthetic oligonucleotide
ccacccttgtaccacacacc

SEQ ID NO: 9141 - DNA, 20 bp, Artificial Sequence
  Description of Artificial Sequence: Synthetic oligonucleotide
cacccttgtaccacacaccg

SEQ ID NO: 9142 - DNA, 20 bp, Artificial Sequence
  Description of Artificial Sequence: Synthetic oligonucleotide
acccttgtaccacacaccgt

SEQ ID NO: 9143 - DNA, 20 bp, Artificial Sequence
  Description of Artificial Sequence: Synthetic oligonucleotide
cccttgtaccacacaccgtc

SEQ ID NO: 9144 - DNA, 20 bp, Artificial Sequence
  Description of Artificial Sequence: Synthetic oligonucleotide
ccttgtaccacacaccgtcc

SEQ ID NO: 9145 - DNA, 20 bp, Artificial Sequence
  Description of Artificial Sequence: Synthetic oligonucleotide
cttgtaccacacaccgtcct

SEQ ID NO: 9146 - DNA, 20 bp, Artificial Sequence
  Description of Artificial Sequence: Synthetic oligonucleotide
ttgtaccacacaccgtcctg

SEQ ID NO: 9147 - DNA, 20 bp, Artificial Sequence
  Description of Artificial Sequence: Synthetic oligonucleotide
tgtaccacacaccgtcctgc

SEQ ID NO: 9148 - DNA, 20 bp, Artificial Sequence
  Description of Artificial Sequence: Synthetic oligonucleotide
gtaccacacaccgtcctgcc

SEQ ID NO: 9149 - DNA, 20 bp, Artificial Sequence
  Description of Artificial Sequence: Synthetic oligonucleotide
taccacacaccgtcctgcca

SEQ ID NO: 9150 - DNA, 20 bp, Artificial Sequence
  Description of Artificial Sequence: Synthetic oligonucleotide
accacacaccgtcctgccac

SEQ ID NO: 9151 - DNA, 20 bp, Artificial Sequence
  Description of Artificial Sequence: Synthetic oligonucleotide
ccacacaccgtcctgccaca

SEQ ID NO: 9152 - DNA, 20 bp, Artificial Sequence
  Description of Artificial Sequence: Synthetic oligonucleotide
cacacaccgtcctgccacag

SEQ ID NO: 9153 - DNA, 20 bp, Artificial Sequence
  Description of Artificial Sequence: Synthetic oligonucleotide
acacaccgtcctgccacagg

SEQ ID NO: 9154 - DNA, 20 bp, Artificial Sequence
  Description of Artificial Sequence: Synthetic oligonucleotide
cacaccgtcctgccacaggg

SEQ ID NO: 9155 - DNA, 20 bp, Artificial Sequence
  Description of Artificial Sequence: Synthetic oligonucleotide
acaccgtcctgccacaggga

SEQ ID NO: 9156 - DNA, 20 bp, Artificial Sequence
  Description of Artificial Sequence: Synthetic oligonucleotide
caccgtcctgccacagggac

SEQ ID NO: 9157 - DNA, 20 bp, Artificial Sequence
  Description of Artificial Sequence: Synthetic oligonucleotide
accgtcctgccacagggact

SEQ ID NO: 9158 - DNA, 20 bp, Artificial Sequence
  Description of Artificial Sequence: Synthetic oligonucleotide
ccgtcctgccacagggactt

SEQ ID NO: 9159 - DNA, 20 bp, Artificial Sequence
  Description of Artificial Sequence: Synthetic oligonucleotide
cgtcctgccacagggacttt

SEQ ID NO: 9160 - DNA, 20 bp, Artificial Sequence
  Description of Artificial Sequence: Synthetic oligonucleotide
gtcctgccacagggactttg

SEQ ID NO: 9161 - DNA, 20 bp, Artificial Sequence
  Description of Artificial Sequence: Synthetic oligonucleotide
tcctgccacagggactttgc

SEQ ID NO: 9162 - DNA, 20 bp, Artificial Sequence
  Description of Artificial Sequence: Synthetic oligonucleotide
cctgccacagggactttgca

SEQ ID NO: 9163 - DNA, 20 bp, Artificial Sequence
  Description of Artificial Sequence: Synthetic oligonucleotide
ctgccacagggactttgcac

SEQ ID NO: 9164 - DNA, 20 bp, Artificial Sequence
  Description of Artificial Sequence: Synthetic oligonucleotide
tgccacagggactttgcaca

SEQ ID NO: 9165 - DNA, 20 bp, Artificial Sequence
  Description of Artificial Sequence: Synthetic oligonucleotide
gccacagggactttgcacat

SEQ ID NO: 9166 - DNA, 20 bp, Artificial Sequence
  Description of Artificial Sequence: Synthetic oligonucleotide
ccacagggactttgcacatg

SEQ ID NO: 9167 - DNA, 20 bp, Artificial Sequence
  Description of Artificial Sequence: Synthetic oligonucleotide
cacagggactttgcacatgc

SEQ ID NO: 9168 - DNA, 20 bp, Artificial Sequence
  Description of Artificial Sequence: Synthetic oligonucleotide
acagggactttgcacatgct

SEQ ID NO: 9169 - DNA, 20 bp, Artificial Sequence
  Description of Artificial Sequence: Synthetic oligonucleotide
cagggactttgcacatgctg

SEQ ID NO: 9170 - DNA, 20 bp, Artificial Sequence
  Description of Artificial Sequence: Synthetic oligonucleotide
agggactttgcacatgctgt

SEQ ID NO: 9171 - DNA, 20 bp, Artificial Sequence
  Description of Artificial Sequence: Synthetic oligonucleotide
gggactttgcacatgctgtt

SEQ ID NO: 9172 - DNA, 20 bp, Artificial Sequence
  Description of Artificial Sequence: Synthetic oligonucleotide
ggactttgcacatgctgttc

SEQ ID NO: 9173 - DNA, 20 bp, Artificial Sequence
  Description of Artificial Sequence: Synthetic oligonucleotide
gactttgcacatgctgttcc

SEQ ID NO: 9174 - DNA, 20 bp, Artificial Sequence
  Description of Artificial Sequence: Synthetic oligonucleotide
actttgcacatgctgttccc

SEQ ID NO: 9175 - DNA, 20 bp, Artificial Sequence
  Description of Artificial Sequence: Synthetic oligonucleotide
ctttgcacatgctgttcccc

SEQ ID NO: 9176 - DNA, 20 bp, Artificial Sequence
  Description of Artificial Sequence: Synthetic oligonucleotide
tttgcacatgctgttccccc

SEQ ID NO: 9177 - DNA, 20 bp, Artificial Sequence
  Description of Artificial Sequence: Synthetic oligonucleotide
ttgcacatgctgttccccct

SEQ ID NO: 9178 - DNA, 20 bp, Artificial Sequence
  Description of Artificial Sequence: Synthetic oligonucleotide
tgcacatgctgttccccctg

SEQ ID NO: 9179 - DNA, 20 bp, Artificial Sequence
  Description of Artificial Sequence: Synthetic oligonucleotide
gcacatgctgttccccctgc

SEQ ID NO: 9180 - DNA, 20 bp, Artificial Sequence
  Description of Artificial Sequence: Synthetic oligonucleotide
cacatgctgttccccctgcc

SEQ ID NO: 9181 - DNA, 20 bp, Artificial Sequence
  Description of Artificial Sequence: Synthetic oligonucleotide
acatgctgttccccctgcct

SEQ ID NO: 9182 - DNA, 20 bp, Artificial Sequence
  Description of Artificial Sequence: Synthetic oligonucleotide
catgctgttccccctgcctg

SEQ ID NO: 9183 - DNA, 20 bp, Artificial Sequence
  Description of Artificial Sequence: Synthetic oligonucleotide
atgctgttccccctgcctgg

SEQ ID NO: 9184 - DNA, 20 bp, Artificial Sequence
  Description of Artificial Sequence: Synthetic oligonucleotide
tgctgttccccctgcctggg

SEQ ID NO: 9185 - DNA, 20 bp, Artificial Sequence
  Description of Artificial Sequence: Synthetic oligonucleotide
gctgttccccctgcctggga

SEQ ID NO: 9186 - DNA, 20 bp, Artificial Sequence
  Description of Artificial Sequence: Synthetic oligonucleotide
ctgttccccctgcctgggac

SEQ ID NO: 9187 - DNA, 20 bp, Artificial Sequence
  Description of Artificial Sequence: Synthetic oligonucleotide
tgttccccctgcctgggact

SEQ ID NO: 9188 - DNA, 20 bp, Artificial Sequence
  Description of Artificial Sequence: Synthetic oligonucleotide
gttccccctgcctgggactc

SEQ ID NO: 9189 - DNA, 20 bp, Artificial Sequence
  Description of Artificial Sequence: Synthetic oligonucleotide
ttccccctgcctgggactct

SEQ ID NO: 9190 - DNA, 20 bp, Artificial Sequence
  Description of Artificial Sequence: Synthetic oligonucleotide
tccccctgcctgggactctc

SEQ ID NO: 9191 - DNA, 20 bp, Artificial Sequence
  Description of Artificial Sequence: Synthetic oligonucleotide
ccccctgcctgggactctct

SEQ ID NO: 9192 - DNA, 20 bp, Artificial Sequence
  Description of Artificial Sequence: Synthetic oligonucleotide
cccctgcctgggactctctt

SEQ ID NO: 9193 - DNA, 20 bp, Artificial Sequence
  Description of Artificial Sequence: Synthetic oligonucleotide
ccctgcctgggactctcttt

SEQ ID NO: 9194 - DNA, 20 bp, Artificial Sequence
  Description of Artificial Sequence: Synthetic oligonucleotide
cctgcctgggactctctttt

SEQ ID NO: 9195 - DNA, 20 bp, Artificial Sequence
  Description of Artificial Sequence: Synthetic oligonucleotide
ctgcctgggactctcttttt

SEQ ID NO: 9196 - DNA, 20 bp, Artificial Sequence
  Description of Artificial Sequence: Synthetic oligonucleotide
tgcctgggactctctttttt

SEQ ID NO: 9197 - DNA, 20 bp, Artificial Sequence
  Description of Artificial Sequence: Synthetic oligonucleotide
gcctgggactctcttttttt

SEQ ID NO: 9198 - DNA, 20 bp, Artificial Sequence
  Description of Artificial Sequence: Synthetic oligonucleotide
cctgggactctctttttttg

SEQ ID NO: 9199 - DNA, 20 bp, Artificial Sequence
  Description of Artificial Sequence: Synthetic oligonucleotide
ctgggactctctttttttgt

SEQ ID NO: 9200 - DNA, 20 bp, Artificial Sequence
  Description of Artificial Sequence: Synthetic oligonucleotide
tgggactctctttttttgtt

SEQ ID NO: 9201 - DNA, 20 bp, Artificial Sequence
  Description of Artificial Sequence: Synthetic oligonucleotide
gggactctctttttttgttt

SEQ ID NO: 9202 - DNA, 20 bp, Artificial Sequence
  Description of Artificial Sequence: Synthetic oligonucleotide
ggactctctttttttgtttt

SEQ ID NO: 9203 - DNA, 20 bp, Artificial Sequence
  Description of Artificial Sequence: Synthetic oligonucleotide
gactctctttttttgttttg

SEQ ID NO: 9204 - DNA, 20 bp, Artificial Sequence
  Description of Artificial Sequence: Synthetic oligonucleotide
actctctttttttgttttgt

SEQ ID NO: 9205 - DNA, 20 bp, Artificial Sequence
  Description of Artificial Sequence: Synthetic oligonucleotide
ctctctttttttgttttgtt

SEQ ID NO: 9206 - DNA, 20 bp, Artificial Sequence
  Description of Artificial Sequence: Synthetic oligonucleotide
tctctttttttgttttgttt

SEQ ID NO: 9207 - DNA, 20 bp, Artificial Sequence
  Description of Artificial Sequence: Synthetic oligonucleotide
ctctttttttgttttgtttt

SEQ ID NO: 9208 - DNA, 20 bp, Artificial Sequence
  Description of Artificial Sequence: Synthetic oligonucleotide
tctttttttgttttgttttt

SEQ ID NO: 9209 - DNA, 20 bp, Artificial Sequence
  Description of Artificial Sequence: Synthetic oligonucleotide
ctttttttgttttgtttttt

SEQ ID NO: 9210 - DNA, 20 bp, Artificial Sequence
  Description of Artificial Sequence: Synthetic oligonucleotide
tttttttgttttgttttttg

SEQ ID NO: 9211 - DNA, 20 bp, Artificial Sequence
  Description of Artificial Sequence: Synthetic oligonucleotide
ttttttgttttgttttttga

SEQ ID NO: 9212 - DNA, 20 bp, Artificial Sequence
  Description of Artificial Sequence: Synthetic oligonucleotide
tttttgttttgttttttgat

SEQ ID NO: 9213 - DNA, 20 bp, Artificial Sequence
  Description of Artificial Sequence: Synthetic oligonucleotide
ttttgttttgttttttgata

SEQ ID NO: 9214 - DNA, 20 bp, Artificial Sequence
  Description of Artificial Sequence: Synthetic oligonucleotide
tttgttttgttttttgatac

SEQ ID NO: 9215 - DNA, 20 bp, Artificial Sequence
  Description of Artificial Sequence: Synthetic oligonucleotide
ttgttttgttttttgatacg

SEQ ID NO: 9216 - DNA, 20 bp, Artificial Sequence
  Description of Artificial Sequence: Synthetic oligonucleotide
tgttttgttttttgatacgg

SEQ ID NO: 9217 - DNA, 20 bp, Artificial Sequence
  Description of Artificial Sequence: Synthetic oligonucleotide
gttttgttttttgatacgga

SEQ ID NO: 9218 - DNA, 20 bp, Artificial Sequence
  Description of Artificial Sequence: Synthetic oligonucleotide
ttttgttttttgatacggag

SEQ ID NO: 9219 - DNA, 20 bp, Artificial Sequence
  Description of Artificial Sequence: Synthetic oligonucleotide
tttgttttttgatacggagt

SEQ ID NO: 9220 - DNA, 20 bp, Artificial Sequence
  Description of Artificial Sequence: Synthetic oligonucleotide
ttgttttttgatacggagtc

SEQ ID NO: 9221 - DNA, 20 bp, Artificial Sequence
  Description of Artificial Sequence: Synthetic oligonucleotide
tgttttttgatacggagtct

SEQ ID NO: 9222 - DNA, 20 bp, Artificial Sequence
  Description of Artificial Sequence: Synthetic oligonucleotide
gttttttgatacggagtctc

SEQ ID NO: 9223 - DNA, 20 bp, Artificial Sequence
  Description of Artificial Sequence: Synthetic oligonucleotide
ttttttgatacggagtctcg

SEQ ID NO: 9224 - DNA, 20 bp, Artificial Sequence
  Description of Artificial Sequence: Synthetic oligonucleotide
tttttgatacggagtctcgc

SEQ ID NO: 9225 - DNA, 20 bp, Artificial Sequence
  Description of Artificial Sequence: Synthetic oligonucleotide
ttttgatacggagtctcgct

SEQ ID NO: 9226 - DNA, 20 bp, Artificial Sequence
  Description of Artificial Sequence: Synthetic oligonucleotide
tttgatacggagtctcgctc

SEQ ID NO: 9227 - DNA, 20 bp, Artificial Sequence
  Description of Artificial Sequence: Synthetic oligonucleotide
ttgatacggagtctcgctct

SEQ ID NO: 9228 - DNA, 20 bp, Artificial Sequence
  Description of Artificial Sequence: Synthetic oligonucleotide
tgatacggagtctcgctctg

SEQ ID NO: 9229 - DNA, 20 bp, Artificial Sequence
  Description of Artificial Sequence: Synthetic oligonucleotide
gatacggagtctcgctctgt

SEQ ID NO: 9230 - DNA, 20 bp, Artificial Sequence
  Description of Artificial Sequence: Synthetic oligonucleotide
atacggagtctcgctctgtc

SEQ ID NO: 9231 - DNA, 20 bp, Artificial Sequence
  Description of Artificial Sequence: Synthetic oligonucleotide
tacggagtctcgctctgtcg

SEQ ID NO: 9232 - DNA, 20 bp, Artificial Sequence
  Description of Artificial Sequence: Synthetic oligonucleotide
acggagtctcgctctgtcgc

SEQ ID NO: 9233 - DNA, 20 bp, Artificial Sequence
  Description of Artificial Sequence: Synthetic oligonucleotide
cggagtctcgctctgtcgcc

SEQ ID NO: 9234 - DNA, 20 bp, Artificial Sequence
  Description of Artificial Sequence: Synthetic oligonucleotide
ggagtctcgctctgtcgcca

SEQ ID NO: 9235 - DNA, 20 bp, Artificial Sequence
  Description of Artificial Sequence: Synthetic oligonucleotide
gagtctcgctctgtcgccag

SEQ ID NO: 9236 - DNA, 20 bp, Artificial Sequence
  Description of Artificial Sequence: Synthetic oligonucleotide
agtctcgctctgtcgccagg

SEQ ID NO: 9237 - DNA, 20 bp, Artificial Sequence
  Description of Artificial Sequence: Synthetic oligonucleotide
gtctcgctctgtcgccaggc

SEQ ID NO: 9238 - DNA, 20 bp, Artificial Sequence
  Description of Artificial Sequence: Synthetic oligonucleotide
tctcgctctgtcgccaggct

SEQ ID NO: 9239 - DNA, 20 bp, Artificial Sequence
  Description of Artificial Sequence: Synthetic oligonucleotide
ctcgctctgtcgccaggctg

SEQ ID NO: 9240 - DNA, 20 bp, Artificial Sequence
  Description of Artificial Sequence: Synthetic oligonucleotide
tcgctctgtcgccaggctgg

SEQ ID NO: 9241 - DNA, 20 bp, Artificial Sequence
  Description of Artificial Sequence: Synthetic oligonucleotide
cgctctgtcgccaggctgga

SEQ ID NO: 9242 - DNA, 20 bp, Artificial Sequence
  Description of Artificial Sequence: Synthetic oligonucleotide
gctctgtcgccaggctggag

SEQ ID NO: 9243 - DNA, 20 bp, Artificial Sequence
  Description of Artificial Sequence: Synthetic oligonucleotide
ctctgtcgccaggctggagt

SEQ ID NO: 9244 - DNA, 20 bp, Artificial Sequence
  Description of Artificial Sequence: Synthetic oligonucleotide
tctgtcgccaggctggagtg

SEQ ID NO: 9245 - DNA, 20 bp, Artificial Sequence
  Description of Artificial Sequence: Synthetic oligonucleotide
ctgtcgccaggctggagtgc

SEQ ID NO: 9246 - DNA, 20 bp, Artificial Sequence
  Description of Artificial Sequence: Synthetic oligonucleotide
tgtcgccaggctggagtgca

SEQ ID NO: 9247 - DNA, 20 bp, Artificial Sequence
  Description of Artificial Sequence: Synthetic oligonucleotide
gtcgccaggctggagtgcag

SEQ ID NO: 9248 - DNA, 20 bp, Artificial Sequence
  Description of Artificial Sequence: Synthetic oligonucleotide
tcgccaggctggagtgcagt

SEQ ID NO: 9249 - DNA, 20 bp, Artificial Sequence
  Description of Artificial Sequence: Synthetic oligonucleotide
cgccaggctggagtgcagtg

SEQ ID NO: 9250 - DNA, 20 bp, Artificial Sequence
  Description of Artificial Sequence: Synthetic oligonucleotide
gccaggctggagtgcagtgg

SEQ ID NO: 9251 - DNA, 20 bp, Artificial Sequence
  Description of Artificial Sequence: Synthetic oligonucleotide
ccaggctggagtgcagtggc

SEQ ID NO: 9252 - DNA, 20 bp, Artificial Sequence
  Description of Artificial Sequence: Synthetic oligonucleotide
caggctggagtgcagtggcg

SEQ ID NO: 9253 - DNA, 20 bp, Artificial Sequence
  Description of Artificial Sequence: Synthetic oligonucleotide
aggctggagtgcagtggcgc

SEQ ID NO: 9254 - DNA, 20 bp, Artificial Sequence
  Description of Artificial Sequence: Synthetic oligonucleotide
ggctggagtgcagtggcgca

SEQ ID NO: 9255 - DNA, 20 bp, Artificial Sequence
  Description of Artificial Sequence: Synthetic oligonucleotide
gctggagtgcagtggcgcaa

SEQ ID NO: 9256 - DNA, 20 bp, Artificial Sequence
  Description of Artificial Sequence: Synthetic oligonucleotide
ctggagtgcagtggcgcaat

SEQ ID NO: 9257 - DNA, 20 bp, Artificial Sequence
  Description of Artificial Sequence: Synthetic oligonucleotide
tggagtgcagtggcgcaatc

SEQ ID NO: 9258 - DNA, 20 bp, Artificial Sequence
  Description of Artificial Sequence: Synthetic oligonucleotide
ggagtgcagtggcgcaatct

SEQ ID NO: 9259 - DNA, 20 bp, Artificial Sequence
  Description of Artificial Sequence: Synthetic oligonucleotide
gagtgcagtggcgcaatctt

SEQ ID NO: 9260 - DNA, 20 bp, Artificial Sequence
  Description of Artificial Sequence: Synthetic oligonucleotide
agtgcagtggcgcaatcttg

SEQ ID NO: 9261 - DNA, 20 bp, Artificial Sequence
  Description of Artificial Sequence: Synthetic oligonucleotide
gtgcagtggcgcaatcttgg

SEQ ID NO: 9262 - DNA, 20 bp, Artificial Sequence
  Description of Artificial Sequence: Synthetic oligonucleotide
tgcagtggcgcaatcttggc

SEQ ID NO: 9263 - DNA, 20 bp, Artificial Sequence
  Description of Artificial Sequence: Synthetic oligonucleotide
gcagtggcgcaatcttggct

SEQ ID NO: 9264 - DNA, 20 bp, Artificial Sequence
  Description of Artificial Sequence: Synthetic oligonucleotide
cagtggcgcaatcttggctc

SEQ ID NO: 9265 - DNA, 20 bp, Artificial Sequence
  Description of Artificial Sequence: Synthetic oligonucleotide
agtggcgcaatcttggctca

SEQ ID NO: 9266 - DNA, 20 bp, Artificial Sequence
  Description of Artificial Sequence: Synthetic oligonucleotide
gtggcgcaatcttggctcac

SEQ ID NO: 9267 - DNA, 20 bp, Artificial Sequence
  Description of Artificial Sequence: Synthetic oligonucleotide
tggcgcaatcttggctcact

SEQ ID NO: 9268 - DNA, 20 bp, Artificial Sequence
  Description of Artificial Sequence: Synthetic oligonucleotide
ggcgcaatcttggctcactg

SEQ ID NO: 9269 - DNA, 20 bp, Artificial Sequence
  Description of Artificial Sequence: Synthetic oligonucleotide
gcgcaatcttggctcactgc

SEQ ID NO: 9270 - DNA, 20 bp, Artificial Sequence
  Description of Artificial Sequence: Synthetic oligonucleotide
cgcaatcttggctcactgca

SEQ ID NO: 9271 - DNA, 20 bp, Artificial Sequence
  Description of Artificial Sequence: Synthetic oligonucleotide
gcaatcttggctcactgcaa

SEQ ID NO: 9272 - DNA, 20 bp, Artificial Sequence
  Description of Artificial Sequence: Synthetic oligonucleotide
caatcttggctcactgcaac

SEQ ID NO: 9273 - DNA, 20 bp, Artificial Sequence
  Description of Artificial Sequence: Synthetic oligonucleotide
aatcttggctcactgcaacc

SEQ ID NO: 9274 - DNA, 20 bp, Artificial Sequence
  Description of Artificial Sequence: Synthetic oligonucleotide
atcttggctcactgcaacct

SEQ ID NO: 9275 - DNA, 20 bp, Artificial Sequence
  Description of Artificial Sequence: Synthetic oligonucleotide
tcttggctcactgcaacctc

SEQ ID NO: 9276 - DNA, 20 bp, Artificial Sequence
  Description of Artificial Sequence: Synthetic oligonucleotide
cttggctcactgcaacctcc

SEQ ID NO: 9277 - DNA, 20 bp, Artificial Sequence
  Description of Artificial Sequence: Synthetic oligonucleotide
ttggctcactgcaacctccg

SEQ ID NO: 9278 - DNA, 20 bp, Artificial Sequence
  Description of Artificial Sequence: Synthetic oligonucleotide
tggctcactgcaacctccgc

SEQ ID NO: 9279 - DNA, 20 bp, Artificial Sequence
  Description of Artificial Sequence: Synthetic oligonucleotide
ggctcactgcaacctccgcc

SEQ ID NO: 9280 - DNA, 20 bp, Artificial Sequence
  Description of Artificial Sequence: Synthetic oligonucleotide
gctcactgcaacctccgcct

SEQ ID NO: 9281 - DNA, 20 bp, Artificial Sequence
  Description of Artificial Sequence: Synthetic oligonucleotide
ctcactgcaacctccgcctc

SEQ ID NO: 9282 - DNA, 20 bp, Artificial Sequence
  Description of Artificial Sequence: Synthetic oligonucleotide
tcactgcaacctccgcctcc

SEQ ID NO: 9283 - DNA, 20 bp, Artificial Sequence
  Description of Artificial Sequence: Synthetic oligonucleotide
cactgcaacctccgcctccc

SEQ ID NO: 9284 - DNA, 20 bp, Artificial Sequence
  Description of Artificial Sequence: Synthetic oligonucleotide
actgcaacctccgcctccca

SEQ ID NO: 9285 - DNA, 20 bp, Artificial Sequence
  Description of Artificial Sequence: Synthetic oligonucleotide
ctgcaacctccgcctcccag

SEQ ID NO: 9286 - DNA, 20 bp, Artificial Sequence
  Description of Artificial Sequence: Synthetic oligonucleotide
tgcaacctccgcctcccagg

SEQ ID NO: 9287 - DNA, 20 bp, Artificial Sequence
  Description of Artificial Sequence: Synthetic oligonucleotide
gcaacctccgcctcccaggt

SEQ ID NO: 9288 - DNA, 20 bp, Artificial Sequence
  Description of Artificial Sequence: Synthetic oligonucleotide
caacctccgcctcccaggtt

SEQ ID NO: 9289 - DNA, 20 bp, Artificial Sequence
  Description of Artificial Sequence: Synthetic oligonucleotide
aacctccgcctcccaggttc

SEQ ID NO: 9290 - DNA, 20 bp, Artificial Sequence
  Description of Artificial Sequence: Synthetic oligonucleotide
acctccgcctcccaggttca

SEQ ID NO: 9291 - DNA, 20 bp, Artificial Sequence
  Description of Artificial Sequence: Synthetic oligonucleotide
cctccgcctcccaggttcaa

SEQ ID NO: 9292 - DNA, 20 bp, Artificial Sequence
  Description of Artificial Sequence: Synthetic oligonucleotide
ctccgcctcccaggttcaag

SEQ ID NO: 9293 - DNA, 20 bp, Artificial Sequence
  Description of Artificial Sequence: Synthetic oligonucleotide
tccgcctcccaggttcaagc

SEQ ID NO: 9294 - DNA, 20 bp, Artificial Sequence
  Description of Artificial Sequence: Synthetic oligonucleotide
ccgcctcccaggttcaagca

SEQ ID NO: 9295 - DNA, 20 bp, Artificial Sequence
  Description of Artificial Sequence: Synthetic oligonucleotide
cgcctcccaggttcaagcaa

SEQ ID NO: 9296 - DNA, 20 bp, Artificial Sequence
  Description of Artificial Sequence: Synthetic oligonucleotide
gcctcccaggttcaagcaat

SEQ ID NO: 9297 - DNA, 20 bp, Artificial Sequence
  Description of Artificial Sequence: Synthetic oligonucleotide
cctcccaggttcaagcaatt

SEQ ID NO: 9298 - DNA, 20 bp, Artificial Sequence
  Description of Artificial Sequence: Synthetic oligonucleotide
ctcccaggttcaagcaattc

SEQ ID NO: 9299 - DNA, 20 bp, Artificial Sequence
  Description of Artificial Sequence: Synthetic oligonucleotide
tcccaggttcaagcaattct

SEQ ID NO: 9300 - DNA, 20 bp, Artificial Sequence
  Description of Artificial Sequence: Synthetic oligonucleotide
cccaggttcaagcaattctg

SEQ ID NO: 9301 - DNA, 20 bp, Artificial Sequence
  Description of Artificial Sequence: Synthetic oligonucleotide
ccaggttcaagcaattctgc

SEQ ID NO: 9302 - DNA, 20 bp, Artificial Sequence
  Description of Artificial Sequence: Synthetic oligonucleotide
caggttcaagcaattctgcc

SEQ ID NO: 9303 - DNA, 20 bp, Artificial Sequence
  Description of Artificial Sequence: Synthetic oligonucleotide
aggttcaagcaattctgccg

SEQ ID NO: 9304 - DNA, 20 bp, Artificial Sequence
  Description of Artificial Sequence: Synthetic oligonucleotide
ggttcaagcaattctgccgc

SEQ ID NO: 9305 - DNA, 20 bp, Artificial Sequence
  Description of Artificial Sequence: Synthetic oligonucleotide
gttcaagcaattctgccgca

SEQ ID NO: 9306 - DNA, 20 bp, Artificial Sequence
  Description of Artificial Sequence: Synthetic oligonucleotide
ttcaagcaattctgccgcag

SEQ ID NO: 9307 - DNA, 20 bp, Artificial Sequence
  Description of Artificial Sequence: Synthetic oligonucleotide
tcaagcaattctgccgcagc

SEQ ID NO: 9308 - DNA, 20 bp, Artificial Sequence
  Description of Artificial Sequence: Synthetic oligonucleotide
caagcaattctgccgcagcc

SEQ ID NO: 9309 - DNA, 20 bp, Artificial Sequence
  Description of Artificial Sequence: Synthetic oligonucleotide
aagcaattctgccgcagcct

SEQ ID NO: 9310 - DNA, 20 bp, Artificial Sequence
  Description of Artificial Sequence: Synthetic oligonucleotide
agcaattctgccgcagcctc

SEQ ID NO: 9311 - DNA, 20 bp, Artificial Sequence
  Description of Artificial Sequence: Synthetic oligonucleotide
gcaattctgccgcagcctcc

SEQ ID NO: 9312 - DNA, 20 bp, Artificial Sequence
  Description of Artificial Sequence: Synthetic oligonucleotide
caattctgccgcagcctccg

SEQ ID NO: 9313 - DNA, 20 bp, Artificial Sequence
  Description of Artificial Sequence: Synthetic oligonucleotide
aattctgccgcagcctccgg

SEQ ID NO: 9314 - DNA, 20 bp, Artificial Sequence
  Description of Artificial Sequence: Synthetic oligonucleotide
attctgccgcagcctccgga

SEQ ID NO: 9315 - DNA, 20 bp, Artificial Sequence
  Description of Artificial Sequence: Synthetic oligonucleotide
ttctgccgcagcctccggag

SEQ ID NO: 9316 - DNA, 20 bp, Artificial Sequence
  Description of Artificial Sequence: Synthetic oligonucleotide
tctgccgcagcctccggagc

SEQ ID NO: 9317 - DNA, 20 bp, Artificial Sequence
  Description of Artificial Sequence: Synthetic oligonucleotide
ctgccgcagcctccggagca

SEQ ID NO: 9318 - DNA, 20 bp, Artificial Sequence
  Description of Artificial Sequence: Synthetic oligonucleotide
tgccgcagcctccggagcag

SEQ ID NO: 9319 - DNA, 20 bp, Artificial Sequence
  Description of Artificial Sequence: Synthetic oligonucleotide
gccgcagcctccggagcagc

SEQ ID NO: 9320 - DNA, 20 bp, Artificial Sequence
  Description of Artificial Sequence: Synthetic oligonucleotide
ccgcagcctccggagcagct

SEQ ID NO: 9321 - DNA, 20 bp, Artificial Sequence
  Description of Artificial Sequence: Synthetic oligonucleotide
cgcagcctccggagcagctg

SEQ ID NO: 9322 - DNA, 20 bp, Artificial Sequence
  Description of Artificial Sequence: Synthetic oligonucleotide
gcagcctccggagcagctgg

SEQ ID NO: 9323 - DNA, 20 bp, Artificial Sequence
  Description of Artificial Sequence: Synthetic oligonucleotide
cagcctccggagcagctggg

SEQ ID NO: 9324 - DNA, 20 bp, Artificial Sequence
  Description of Artificial Sequence: Synthetic oligonucleotide
agcctccggagcagctggga

SEQ ID NO: 9325 - DNA, 20 bp, Artificial Sequence
  Description of Artificial Sequence: Synthetic oligonucleotide
gcctccggagcagctgggac

SEQ ID NO: 9326 - DNA, 20 bp, Artificial Sequence
  Description of Artificial Sequence: Synthetic oligonucleotide
cctccggagcagctgggact

SEQ ID NO: 9327 - DNA, 20 bp, Artificial Sequence
  Description of Artificial Sequence: Synthetic oligonucleotide
ctccggagcagctgggacta

SEQ ID NO: 9328 - DNA, 20 bp, Artificial Sequence
  Description of Artificial Sequence: Synthetic oligonucleotide
tccggagcagctgggactac

SEQ ID NO: 9329 - DNA, 20 bp, Artificial Sequence
  Description of Artificial Sequence: Synthetic oligonucleotide
ccggagcagctgggactaca

SEQ ID NO: 9330 - DNA, 20 bp, Artificial Sequence
  Description of Artificial Sequence: Synthetic oligonucleotide
cggagcagctgggactacag

SEQ ID NO: 9331 - DNA, 20 bp, Artificial Sequence
  Description of Artificial Sequence: Synthetic oligonucleotide
ggagcagctgggactacagg

SEQ ID NO: 9332 - DNA, 20 bp, Artificial Sequence
  Description of Artificial Sequence: Synthetic oligonucleotide
gagcagctgggactacaggc

SEQ ID NO: 9333 - DNA, 20 bp, Artificial Sequence
  Description of Artificial Sequence: Synthetic oligonucleotide
agcagctgggactacaggca

SEQ ID NO: 9334 - DNA, 20 bp, Artificial Sequence
  Description of Artificial Sequence: Synthetic oligonucleotide
gcagctgggactacaggcat

SEQ ID NO: 9335 - DNA, 20 bp, Artificial Sequence
  Description of Artificial Sequence: Synthetic oligonucleotide
cagctgggactacaggcatg

SEQ ID NO: 9336 - DNA, 20 bp, Artificial Sequence
  Description of Artificial Sequence: Synthetic oligonucleotide
agctgggactacaggcatgt

SEQ ID NO: 9337 - DNA, 20 bp, Artificial Sequence
  Description of Artificial Sequence: Synthetic oligonucleotide
gctgggactacaggcatgtg

SEQ ID NO: 9338 - DNA, 20 bp, Artificial Sequence
  Description of Artificial Sequence: Synthetic oligonucleotide
ctgggactacaggcatgtgc

SEQ ID NO: 9339 - DNA, 20 bp, Artificial Sequence
  Description of Artificial Sequence: Synthetic oligonucleotide
tgggactacaggcatgtgcc

SEQ ID NO: 9340 - DNA, 20 bp, Artificial Sequence
  Description of Artificial Sequence: Synthetic oligonucleotide
gggactacaggcatgtgcca

SEQ ID NO: 9341 - DNA, 20 bp, Artificial Sequence
  Description of Artificial Sequence: Synthetic oligonucleotide
ggactacaggcatgtgccac

SEQ ID NO: 9342 - DNA, 20 bp, Artificial Sequence
  Description of Artificial Sequence: Synthetic oligonucleotide
gactacaggcatgtgccacc

SEQ ID NO: 9343 - DNA, 20 bp, Artificial Sequence
  Description of Artificial Sequence: Synthetic oligonucleotide
actacaggcatgtgccacca

SEQ ID NO: 9344 - DNA, 20 bp, Artificial Sequence
  Description of Artificial Sequence: Synthetic oligonucleotide
ctacaggcatgtgccaccac

SEQ ID NO: 9345 - DNA, 20 bp, Artificial Sequence
  Description of Artificial Sequence: Synthetic oligonucleotide
tacaggcatgtgccaccacg

SEQ ID NO: 9346 - DNA, 20 bp, Artificial Sequence
  Description of Artificial Sequence: Synthetic oligonucleotide
acaggcatgtgccaccacgc

SEQ ID NO: 9347 - DNA, 20 bp, Artificial Sequence
  Description of Artificial Sequence: Synthetic oligonucleotide
caggcatgtgccaccacgcc

SEQ ID NO: 9348 - DNA, 20 bp, Artificial Sequence
  Description of Artificial Sequence: Synthetic oligonucleotide
aggcatgtgccaccacgccc

SEQ ID NO: 9349 - DNA, 20 bp, Artificial Sequence
  Description of Artificial Sequence: Synthetic oligonucleotide
ggcatgtgccaccacgcccg

SEQ ID NO: 9350 - DNA, 20 bp, Artificial Sequence
  Description of Artificial Sequence: Synthetic oligonucleotide
gcatgtgccaccacgcccga

SEQ ID NO: 9351 - DNA, 20 bp, Artificial Sequence
  Description of Artificial Sequence: Synthetic oligonucleotide
catgtgccaccacgcccgac

SEQ ID NO: 9352 - DNA, 20 bp, Artificial Sequence
  Description of Artificial Sequence: Synthetic oligonucleotide
atgtgccaccacgcccgact

SEQ ID NO: 9353 - DNA, 20 bp, Artificial Sequence
  Description of Artificial Sequence: Synthetic oligonucleotide
tgtgccaccacgcccgacta

SEQ ID NO: 9354 - DNA, 20 bp, Artificial Sequence
  Description of Artificial Sequence: Synthetic oligonucleotide
gtgccaccacgcccgactag

SEQ ID NO: 9355 - DNA, 20 bp, Artificial Sequence
  Description of Artificial Sequence: Synthetic oligonucleotide
tgccaccacgcccgactagt

SEQ ID NO: 9356 - DNA, 20 bp, Artificial Sequence
  Description of Artificial Sequence: Synthetic oligonucleotide
gccaccacgcccgactagtt

SEQ ID NO: 9357 - DNA, 20 bp, Artificial Sequence
  Description of Artificial Sequence: Synthetic oligonucleotide
ccaccacgcccgactagttt

SEQ ID NO: 9358 - DNA, 20 bp, Artificial Sequence
  Description of Artificial Sequence: Synthetic oligonucleotide
caccacgcccgactagtttt

SEQ ID NO: 9359 - DNA, 20 bp, Artificial Sequence
  Description of Artificial Sequence: Synthetic oligonucleotide
accacgcccgactagttttt

SEQ ID NO: 9360 - DNA, 20 bp, Artificial Sequence
  Description of Artificial Sequence: Synthetic oligonucleotide
ccacgcccgactagtttttg

SEQ ID NO: 9361 - DNA, 20 bp, Artificial Sequence
  Description of Artificial Sequence: Synthetic oligonucleotide
cacgcccgactagtttttgc

SEQ ID NO: 9362 - DNA, 20 bp, Artificial Sequence
  Description of Artificial Sequence: Synthetic oligonucleotide
acgcccgactagtttttgca

SEQ ID NO: 9363 - DNA, 20 bp, Artificial Sequence
  Description of Artificial Sequence: Synthetic oligonucleotide
cgcccgactagtttttgcat

SEQ ID NO: 9364 - DNA, 20 bp, Artificial Sequence
  Description of Artificial Sequence: Synthetic oligonucleotide
gcccgactagtttttgcatt

SEQ ID NO: 9365 - DNA, 20 bp, Artificial Sequence
  Description of Artificial Sequence: Synthetic oligonucleotide
cccgactagtttttgcatta

SEQ ID NO: 9366 - DNA, 20 bp, Artificial Sequence
  Description of Artificial Sequence: Synthetic oligonucleotide
ccgactagtttttgcattat

SEQ ID NO: 9367 - DNA, 20 bp, Artificial Sequence
  Description of Artificial Sequence: Synthetic oligonucleotide
cgactagtttttgcattatt

SEQ ID NO: 9368 - DNA, 20 bp, Artificial Sequence
  Description of Artificial Sequence: Synthetic oligonucleotide
gactagtttttgcattattt

SEQ ID NO: 9369 - DNA, 20 bp, Artificial Sequence
  Description of Artificial Sequence: Synthetic oligonucleotide
actagtttttgcattatttg

SEQ ID NO: 9370 - DNA, 20 bp, Artificial Sequence
  Description of Artificial Sequence: Synthetic oligonucleotide
ctagtttttgcattatttgt

SEQ ID NO: 9371 - DNA, 20 bp, Artificial Sequence
  Description of Artificial Sequence: Synthetic oligonucleotide
tagtttttgcattatttgta

SEQ ID NO: 9372 - DNA, 20 bp, Artificial Sequence
  Description of Artificial Sequence: Synthetic oligonucleotide
agtttttgcattatttgtag

SEQ ID NO: 9373 - DNA, 20 bp, Artificial Sequence
  Description of Artificial Sequence: Synthetic oligonucleotide
gtttttgcattatttgtaga

SEQ ID NO: 9374 - DNA, 20 bp, Artificial Sequence
  Description of Artificial Sequence: Synthetic oligonucleotide
tttttgcattatttgtagag

SEQ ID NO: 9375 - DNA, 20 bp, Artificial Sequence
  Description of Artificial Sequence: Synthetic oligonucleotide
ttttgcattatttgtagaga

SEQ ID NO: 9376 - DNA, 20 bp, Artificial Sequence
  Description of Artificial Sequence: Synthetic oligonucleotide
tttgcattatttgtagagac

SEQ ID NO: 9377 - DNA, 20 bp, Artificial Sequence
  Description of Artificial Sequence: Synthetic oligonucleotide
ttgcattatttgtagagacg

SEQ ID NO: 9378 - DNA, 20 bp, Artificial Sequence
  Description of Artificial Sequence: Synthetic oligonucleotide
tgcattatttgtagagacgg

SEQ ID NO: 9379 - DNA, 20 bp, Artificial Sequence
  Description of Artificial Sequence: Synthetic oligonucleotide
gcattatttgtagagacggg

SEQ ID NO: 9380 - DNA, 20 bp, Artificial Sequence
  Description of Artificial Sequence: Synthetic oligonucleotide
cattatttgtagagacgggg

SEQ ID NO: 9381 - DNA, 20 bp, Artificial Sequence
  Description of Artificial Sequence: Synthetic oligonucleotide
attatttgtagagacggggg

SEQ ID NO: 9382 - DNA, 20 bp, Artificial Sequence
  Description of Artificial Sequence: Synthetic oligonucleotide
ttatttgtagagacgggggt

SEQ ID NO: 9383 - DNA, 20 bp, Artificial Sequence
  Description of Artificial Sequence: Synthetic oligonucleotide
tatttgtagagacgggggtt

SEQ ID NO: 9384 - DNA, 20 bp, Artificial Sequence
  Description of Artificial Sequence: Synthetic oligonucleotide
atttgtagagacgggggttt

SEQ ID NO: 9385 - DNA, 20 bp, Artificial Sequence
  Description of Artificial Sequence: Synthetic oligonucleotide
tttgtagagacgggggtttc

SEQ ID NO: 9386 - DNA, 20 bp, Artificial Sequence
  Description of Artificial Sequence: Synthetic oligonucleotide
ttgtagagacgggggtttca

SEQ ID NO: 9387 - DNA, 20 bp, Artificial Sequence
  Description of Artificial Sequence: Synthetic oligonucleotide
tgtagagacgggggtttcac

SEQ ID NO: 9388 - DNA, 20 bp, Artificial Sequence
  Description of Artificial Sequence: Synthetic oligonucleotide
gtagagacgggggtttcacc

SEQ ID NO: 9389 - DNA, 20 bp, Artificial Sequence
  Description of Artificial Sequence: Synthetic oligonucleotide
tagagacgggggtttcacca

SEQ ID NO: 9390 - DNA, 20 bp, Artificial Sequence
  Description of Artificial Sequence: Synthetic oligonucleotide
agagacgggggtttcaccat

SEQ ID NO: 9391 - DNA, 20 bp, Artificial Sequence
  Description of Artificial Sequence: Synthetic oligonucleotide
gagacgggggtttcaccatg

SEQ ID NO: 9392 - DNA, 20 bp, Artificial Sequence
  Description of Artificial Sequence: Synthetic oligonucleotide
agacgggggtttcaccatgt

SEQ ID NO: 9393 - DNA, 20 bp, Artificial Sequence
  Description of Artificial Sequence: Synthetic oligonucleotide
gacgggggtttcaccatgtt

SEQ ID NO: 9394 - DNA, 20 bp, Artificial Sequence
  Description of Artificial Sequence: Synthetic oligonucleotide
acgggggtttcaccatgttg

SEQ ID NO: 9395 - DNA, 20 bp, Artificial Sequence
  Description of Artificial Sequence: Synthetic oligonucleotide
cgggggtttcaccatgttgg

SEQ ID NO: 9396 - DNA, 20 bp, Artificial Sequence
  Description of Artificial Sequence: Synthetic oligonucleotide
gggggtttcaccatgttggc

SEQ ID NO: 9397 - DNA, 20 bp, Artificial Sequence
  Description of Artificial Sequence: Synthetic oligonucleotide
ggggtttcaccatgttggcc

SEQ ID NO: 9398 - DNA, 20 bp, Artificial Sequence
  Description of Artificial Sequence: Synthetic oligonucleotide
gggtttcaccatgttggcca

SEQ ID NO: 9399 - DNA, 20 bp, Artificial Sequence
  Description of Artificial Sequence: Synthetic oligonucleotide
ggtttcaccatgttggccag

SEQ ID NO: 9400 - DNA, 20 bp, Artificial Sequence
  Description of Artificial Sequence: Synthetic oligonucleotide
gtttcaccatgttggccaga

SEQ ID NO: 9401 - DNA, 20 bp, Artificial Sequence
  Description of Artificial Sequence: Synthetic oligonucleotide
tttcaccatgttggccagac

SEQ ID NO: 9402 - DNA, 20 bp, Artificial Sequence
  Description of Artificial Sequence: Synthetic oligonucleotide
ttcaccatgttggccagact

SEQ ID NO: 9403 - DNA, 20 bp, Artificial Sequence
  Description of Artificial Sequence: Synthetic oligonucleotide
tcaccatgttggccagactg

SEQ ID NO: 9404 - DNA, 20 bp, Artificial Sequence
  Description of Artificial Sequence: Synthetic oligonucleotide
caccatgttggccagactgg

SEQ ID NO: 9405 - DNA, 20 bp, Artificial Sequence
  Description of Artificial Sequence: Synthetic oligonucleotide
accatgttggccagactggt

SEQ ID NO: 9406 - DNA, 20 bp, Artificial Sequence
  Description of Artificial Sequence: Synthetic oligonucleotide
ccatgttggccagactggtc

SEQ ID NO: 9407 - DNA, 20 bp, Artificial Sequence
  Description of Artificial Sequence: Synthetic oligonucleotide
catgttggccagactggtct

SEQ ID NO: 9408 - DNA, 20 bp, Artificial Sequence
  Description of Artificial Sequence: Synthetic oligonucleotide
atgttggccagactggtctc

SEQ ID NO: 9409 - DNA, 20 bp, Artificial Sequence
  Description of Artificial Sequence: Synthetic oligonucleotide
tgttggccagactggtctcg

SEQ ID NO: 9410 - DNA, 20 bp, Artificial Sequence
  Description of Artificial Sequence: Synthetic oligonucleotide
gttggccagactggtctcga

SEQ ID NO: 9411 - DNA, 20 bp, Artificial Sequence
  Description of Artificial Sequence: Synthetic oligonucleotide
ttggccagactggtctcgat

SEQ ID NO: 9412 - DNA, 20 bp, Artificial Sequence
  Description of Artificial Sequence: Synthetic oligonucleotide
tggccagactggtctcgatc

SEQ ID NO: 9413 - DNA, 20 bp, Artificial Sequence
  Description of Artificial Sequence: Synthetic oligonucleotide
ggccagactggtctcgatct

SEQ ID NO: 9414 - DNA, 20 bp, Artificial Sequence
  Description of Artificial Sequence: Synthetic oligonucleotide
gccagactggtctcgatctc

SEQ ID NO: 9415 - DNA, 20 bp, Artificial Sequence
  Description of Artificial Sequence: Synthetic oligonucleotide
ccagactggtctcgatctcc

SEQ ID NO: 9416 - DNA, 20 bp, Artificial Sequence
  Description of Artificial Sequence: Synthetic oligonucleotide
cagactggtctcgatctcct

SEQ ID NO: 9417 - DNA, 20 bp, Artificial Sequence
  Description of Artificial Sequence: Synthetic oligonucleotide
agactggtctcgatctcctg

SEQ ID NO: 9418 - DNA, 20 bp, Artificial Sequence
  Description of Artificial Sequence: Synthetic oligonucleotide
gactggtctcgatctcctga

SEQ ID NO: 9419 - DNA, 20 bp, Artificial Sequence
  Description of Artificial Sequence: Synthetic oligonucleotide
actggtctcgatctcctgac

SEQ ID NO: 9420 - DNA, 20 bp, Artificial Sequence
  Description of Artificial Sequence: Synthetic oligonucleotide
ctggtctcgatctcctgacc

SEQ ID NO: 9421 - DNA, 20 bp, Artificial Sequence
  Description of Artificial Sequence: Synthetic oligonucleotide
tggtctcgatctcctgacct

SEQ ID NO: 9422 - DNA, 20 bp, Artificial Sequence
  Description of Artificial Sequence: Synthetic oligonucleotide
ggtctcgatctcctgacctc

SEQ ID NO: 9423 - DNA, 20 bp, Artificial Sequence
  Description of Artificial Sequence: Synthetic oligonucleotide
gtctcgatctcctgacctcg

SEQ ID NO: 9424 - DNA, 20 bp, Artificial Sequence
  Description of Artificial Sequence: Synthetic oligonucleotide
tctcgatctcctgacctcgt

SEQ ID NO: 9425 - DNA, 20 bp, Artificial Sequence
  Description of Artificial Sequence: Synthetic oligonucleotide
ctcgatctcctgacctcgtg

SEQ ID NO: 9426 - DNA, 20 bp, Artificial Sequence
  Description of Artificial Sequence: Synthetic oligonucleotide
tcgatctcctgacctcgtga

SEQ ID NO: 9427 - DNA, 20 bp, Artificial Sequence
  Description of Artificial Sequence: Synthetic oligonucleotide
cgatctcctgacctcgtgat

SEQ ID NO: 9428 - DNA, 20 bp, Artificial Sequence
  Description of Artificial Sequence: Synthetic oligonucleotide
gatctcctgacctcgtgatc

SEQ ID NO: 9429 - DNA, 20 bp, Artificial Sequence
  Description of Artificial Sequence: Synthetic oligonucleotide
atctcctgacctcgtgatcc

SEQ ID NO: 9430 - DNA, 20 bp, Artificial Sequence
  Description of Artificial Sequence: Synthetic oligonucleotide
tctcctgacctcgtgatccg

SEQ ID NO: 9431 - DNA, 20 bp, Artificial Sequence
  Description of Artificial Sequence: Synthetic oligonucleotide
ctcctgacctcgtgatccgc

SEQ ID NO: 9432 - DNA, 20 bp, Artificial Sequence
  Description of Artificial Sequence: Synthetic oligonucleotide
tcctgacctcgtgatccgcc

SEQ ID NO: 9433 - DNA, 20 bp, Artificial Sequence
  Description of Artificial Sequence: Synthetic oligonucleotide
cctgacctcgtgatccgcca

SEQ ID NO: 9434 - DNA, 20 bp, Artificial Sequence
  Description of Artificial Sequence: Synthetic oligonucleotide
ctgacctcgtgatccgccag

SEQ ID NO: 9435 - DNA, 20 bp, Artificial Sequence
  Description of Artificial Sequence: Synthetic oligonucleotide
tgacctcgtgatccgccagc

SEQ ID NO: 9436 - DNA, 20 bp, Artificial Sequence
  Description of Artificial Sequence: Synthetic oligonucleotide
gacctcgtgatccgccagcc

SEQ ID NO: 9437 - DNA, 20 bp, Artificial Sequence
  Description of Artificial Sequence: Synthetic oligonucleotide
acctcgtgatccgccagcct

SEQ ID NO: 9438 - DNA, 20 bp, Artificial Sequence
  Description of Artificial Sequence: Synthetic oligonucleotide
cctcgtgatccgccagcctt

SEQ ID NO: 9439 - DNA, 20 bp, Artificial Sequence
  Description of Artificial Sequence: Synthetic oligonucleotide
ctcgtgatccgccagccttg

SEQ ID NO: 9440 - DNA, 20 bp, Artificial Sequence
  Description of Artificial Sequence: Synthetic oligonucleotide
tcgtgatccgccagccttgg

SEQ ID NO: 9441 - DNA, 20 bp, Artificial Sequence
  Description of Artificial Sequence: Synthetic oligonucleotide
cgtgatccgccagccttggc

SEQ ID NO: 9442 - DNA, 20 bp, Artificial Sequence
  Description of Artificial Sequence: Synthetic oligonucleotide
gtgatccgccagccttggcc

SEQ ID NO: 9443 - DNA, 20 bp, Artificial Sequence
  Description of Artificial Sequence: Synthetic oligonucleotide
tgatccgccagccttggcct

SEQ ID NO: 9444 - DNA, 20 bp, Artificial Sequence
  Description of Artificial Sequence: Synthetic oligonucleotide
gatccgccagccttggcctc

SEQ ID NO: 9445 - DNA, 20 bp, Artificial Sequence
  Description of Artificial Sequence: Synthetic oligonucleotide
atccgccagccttggcctcc

SEQ ID NO: 9446 - DNA, 20 bp, Artificial Sequence
  Description of Artificial Sequence: Synthetic oligonucleotide
tccgccagccttggcctccc

SEQ ID NO: 9447 - DNA, 20 bp, Artificial Sequence
  Description of Artificial Sequence: Synthetic oligonucleotide
ccgccagccttggcctccca

SEQ ID NO: 9448 - DNA, 20 bp, Artificial Sequence
  Description of Artificial Sequence: Synthetic oligonucleotide
cgccagccttggcctcccaa

SEQ ID NO: 9449 - DNA, 20 bp, Artificial Sequence
  Description of Artificial Sequence: Synthetic oligonucleotide
gccagccttggcctcccaaa

SEQ ID NO: 9450 - DNA, 20 bp, Artificial Sequence
  Description of Artificial Sequence: Synthetic oligonucleotide
ccagccttggcctcccaaag

SEQ ID NO: 9451 - DNA, 20 bp, Artificial Sequence
  Description of Artificial Sequence: Synthetic oligonucleotide
cagccttggcctcccaaagt

SEQ ID NO: 9452 - DNA, 20 bp, Artificial Sequence
  Description of Artificial Sequence: Synthetic oligonucleotide
agccttggcctcccaaagtg

SEQ ID NO: 9453 - DNA, 20 bp, Artificial Sequence
  Description of Artificial Sequence: Synthetic oligonucleotide
gccttggcctcccaaagtgc

SEQ ID NO: 9454 - DNA, 20 bp, Artificial Sequence
  Description of Artificial Sequence: Synthetic oligonucleotide
ccttggcctcccaaagtgct

SEQ ID NO: 9455 - DNA, 20 bp, Artificial Sequence
  Description of Artificial Sequence: Synthetic oligonucleotide
cttggcctcccaaagtgctg

SEQ ID NO: 9456 - DNA, 20 bp, Artificial Sequence
  Description of Artificial Sequence: Synthetic oligonucleotide
ttggcctcccaaagtgctgg

SEQ ID NO: 9457 - DNA, 20 bp, Artificial Sequence
  Description of Artificial Sequence: Synthetic oligonucleotide
tggcctcccaaagtgctggg

SEQ ID NO: 9458 - DNA, 20 bp, Artificial Sequence
  Description of Artificial Sequence: Synthetic oligonucleotide
ggcctcccaaagtgctggga

SEQ ID NO: 9459 - DNA, 20 bp, Artificial Sequence
  Description of Artificial Sequence: Synthetic oligonucleotide
gcctcccaaagtgctgggat

SEQ ID NO: 9460 - DNA, 20 bp, Artificial Sequence
  Description of Artificial Sequence: Synthetic oligonucleotide
cctcccaaagtgctgggatt

SEQ ID NO: 9461 - DNA, 20 bp, Artificial Sequence
  Description of Artificial Sequence: Synthetic oligonucleotide
ctcccaaagtgctgggatta

SEQ ID NO: 9462 - DNA, 20 bp, Artificial Sequence
  Description of Artificial Sequence: Synthetic oligonucleotide
tcccaaagtgctgggattac

SEQ ID NO: 9463 - DNA, 20 bp, Artificial Sequence
  Description of Artificial Sequence: Synthetic oligonucleotide
cccaaagtgctgggattaca

SEQ ID NO: 9464 - DNA, 20 bp, Artificial Sequence
  Description of Artificial Sequence: Synthetic oligonucleotide
ccaaagtgctgggattacag

SEQ ID NO: 9465 - DNA, 20 bp, Artificial Sequence
  Description of Artificial Sequence: Synthetic oligonucleotide
caaagtgctgggattacagg

SEQ ID NO: 9466 - DNA, 20 bp, Artificial Sequence
  Description of Artificial Sequence: Synthetic oligonucleotide
aaagtgctgggattacaggt

SEQ ID NO: 9467 - DNA, 20 bp, Artificial Sequence
  Description of Artificial Sequence: Synthetic oligonucleotide
aagtgctgggattacaggtg

SEQ ID NO: 9468 - DNA, 20 bp, Artificial Sequence
  Description of Artificial Sequence: Synthetic oligonucleotide
agtgctgggattacaggtgt

SEQ ID NO: 9469 - DNA, 20 bp, Artificial Sequence
  Description of Artificial Sequence: Synthetic oligonucleotide
gtgctgggattacaggtgtg

SEQ ID NO: 9470 - DNA, 20 bp, Artificial Sequence
  Description of Artificial Sequence: Synthetic oligonucleotide
tgctgggattacaggtgtga

SEQ ID NO: 9471 - DNA, 20 bp, Artificial Sequence
  Description of Artificial Sequence: Synthetic oligonucleotide
gctgggattacaggtgtgaa

SEQ ID NO: 9472 - DNA, 20 bp, Artificial Sequence
  Description of Artificial Sequence: Synthetic oligonucleotide
ctgggattacaggtgtgaac

SEQ ID NO: 9473 - DNA, 20 bp, Artificial Sequence
  Description of Artificial Sequence: Synthetic oligonucleotide
tgggattacaggtgtgaacc

SEQ ID NO: 9474 - DNA, 20 bp, Artificial Sequence
  Description of Artificial Sequence: Synthetic oligonucleotide
gggattacaggtgtgaacca

SEQ ID NO: 9475 - DNA, 20 bp, Artificial Sequence
  Description of Artificial Sequence: Synthetic oligonucleotide
ggattacaggtgtgaaccac

SEQ ID NO: 9476 - DNA, 20 bp, Artificial Sequence
  Description of Artificial Sequence: Synthetic oligonucleotide
gattacaggtgtgaaccact

SEQ ID NO: 9477 - DNA, 20 bp, Artificial Sequence
  Description of Artificial Sequence: Synthetic oligonucleotide
attacaggtgtgaaccactg

SEQ ID NO: 9478 - DNA, 20 bp, Artificial Sequence
  Description of Artificial Sequence: Synthetic oligonucleotide
ttacaggtgtgaaccactgc

SEQ ID NO: 9479 - DNA, 20 bp, Artificial Sequence
  Description of Artificial Sequence: Synthetic oligonucleotide
tacaggtgtgaaccactgcg

SEQ ID NO: 9480 - DNA, 20 bp, Artificial Sequence
  Description of Artificial Sequence: Synthetic oligonucleotide
acaggtgtgaaccactgcgc

SEQ ID NO: 9481 - DNA, 20 bp, Artificial Sequence
  Description of Artificial Sequence: Synthetic oligonucleotide
caggtgtgaaccactgcgcc

SEQ ID NO: 9482 - DNA, 20 bp, Artificial Sequence
  Description of Artificial Sequence: Synthetic oligonucleotide
aggtgtgaaccactgcgccc

SEQ ID NO: 9483 - DNA, 20 bp, Artificial Sequence
  Description of Artificial Sequence: Synthetic oligonucleotide
ggtgtgaaccactgcgcccg

SEQ ID NO: 9484 - DNA, 20 bp, Artificial Sequence
  Description of Artificial Sequence: Synthetic oligonucleotide
gtgtgaaccactgcgcccgg

SEQ ID NO: 9485 - DNA, 20 bp, Artificial Sequence
  Description of Artificial Sequence: Synthetic oligonucleotide
tgtgaaccactgcgcccggc

SEQ ID NO: 9486 - DNA, 20 bp, Artificial Sequence
  Description of Artificial Sequence: Synthetic oligonucleotide
gtgaaccactgcgcccggcg

SEQ ID NO: 9487 - DNA, 20 bp, Artificial Sequence
  Description of Artificial Sequence: Synthetic oligonucleotide
tgaaccactgcgcccggcgg

SEQ ID NO: 9488 - DNA, 20 bp, Artificial Sequence
  Description of Artificial Sequence: Synthetic oligonucleotide
gaaccactgcgcccggcggg

SEQ ID NO: 9489 - DNA, 20 bp, Artificial Sequence
  Description of Artificial Sequence: Synthetic oligonucleotide
aaccactgcgcccggcggga

SEQ ID NO: 9490 - DNA, 20 bp, Artificial Sequence
  Description of Artificial Sequence: Synthetic oligonucleotide
accactgcgcccggcgggac

SEQ ID NO: 9491 - DNA, 20 bp, Artificial Sequence
  Description of Artificial Sequence: Synthetic oligonucleotide
ccactgcgcccggcgggact

SEQ ID NO: 9492 - DNA, 20 bp, Artificial Sequence
  Description of Artificial Sequence: Synthetic oligonucleotide
cactgcgcccggcgggactc

SEQ ID NO: 9493 - DNA, 20 bp, Artificial Sequence
  Description of Artificial Sequence: Synthetic oligonucleotide
actgcgcccggcgggactct

SEQ ID NO: 9494 - DNA, 20 bp, Artificial Sequence
  Description of Artificial Sequence: Synthetic oligonucleotide
ctgcgcccggcgggactctc

SEQ ID NO: 9495 - DNA, 20 bp, Artificial Sequence
  Description of Artificial Sequence: Synthetic oligonucleotide
tgcgcccggcgggactctct

SEQ ID NO: 9496 - DNA, 20 bp, Artificial Sequence
  Description of Artificial Sequence: Synthetic oligonucleotide
gcgcccggcgggactctctt

SEQ ID NO: 9497 - DNA, 20 bp, Artificial Sequence
  Description of Artificial Sequence: Synthetic oligonucleotide
cgcccggcgggactctcttt

SEQ ID NO: 9498 - DNA, 20 bp, Artificial Sequence
  Description of Artificial Sequence: Synthetic oligonucleotide
gcccggcgggactctctttc

SEQ ID NO: 9499 - DNA, 20 bp, Artificial Sequence
  Description of Artificial Sequence: Synthetic oligonucleotide
cccggcgggactctctttcc

SEQ ID NO: 9500 - DNA, 20 bp, Artificial Sequence
  Description of Artificial Sequence: Synthetic oligonucleotide
ccggcgggactctctttcct

SEQ ID NO: 9501 - DNA, 20 bp, Artificial Sequence
  Description of Artificial Sequence: Synthetic oligonucleotide
cggcgggactctctttcctc

SEQ ID NO: 9502 - DNA, 20 bp, Artificial Sequence
  Description of Artificial Sequence: Synthetic oligonucleotide
ggcgggactctctttcctca

SEQ ID NO: 9503 - DNA, 20 bp, Artificial Sequence
  Description of Artificial Sequence: Synthetic oligonucleotide
gcgggactctctttcctcac

SEQ ID NO: 9504 - DNA, 20 bp, Artificial Sequence
  Description of Artificial Sequence: Synthetic oligonucleotide
cgggactctctttcctcact

SEQ ID NO: 9505 - DNA, 20 bp, Artificial Sequence
  Description of Artificial Sequence: Synthetic oligonucleotide
gggactctctttcctcactt

SEQ ID NO: 9506 - DNA, 20 bp, Artificial Sequence
  Description of Artificial Sequence: Synthetic oligonucleotide
ggactctctttcctcacttc

SEQ ID NO: 9507 - DNA, 20 bp, Artificial Sequence
  Description of Artificial Sequence: Synthetic oligonucleotide
gactctctttcctcacttct

SEQ ID NO: 9508 - DNA, 20 bp, Artificial Sequence
  Description of Artificial Sequence: Synthetic oligonucleotide
actctctttcctcacttctc

SEQ ID NO: 9509 - DNA, 20 bp, Artificial Sequence
  Description of Artificial Sequence: Synthetic oligonucleotide
ctctctttcctcacttctct

SEQ ID NO: 9510 - DNA, 20 bp, Artificial Sequence
  Description of Artificial Sequence: Synthetic oligonucleotide
tctctttcctcacttctctc

SEQ ID NO: 9511 - DNA, 20 bp, Artificial Sequence
  Description of Artificial Sequence: Synthetic oligonucleotide
ctctttcctcacttctctct

SEQ ID NO: 9512 - DNA, 20 bp, Artificial Sequence
  Description of Artificial Sequence: Synthetic oligonucleotide
tctttcctcacttctctctc

SEQ ID NO: 9513 - DNA, 20 bp, Artificial Sequence
  Description of Artificial Sequence: Synthetic oligonucleotide
ctttcctcacttctctctct

SEQ ID NO: 9514 - DNA, 20 bp, Artificial Sequence
  Description of Artificial Sequence: Synthetic oligonucleotide
tttcctcacttctctctctg

SEQ ID NO: 9515 - DNA, 20 bp, Artificial Sequence
  Description of Artificial Sequence: Synthetic oligonucleotide
ttcctcacttctctctctgg

SEQ ID NO: 9516 - DNA, 20 bp, Artificial Sequence
  Description of Artificial Sequence: Synthetic oligonucleotide
tcctcacttctctctctggg

SEQ ID NO: 9517 - DNA, 20 bp, Artificial Sequence
  Description of Artificial Sequence: Synthetic oligonucleotide
cctcacttctctctctgggt

SEQ ID NO: 9518 - DNA, 20 bp, Artificial Sequence
  Description of Artificial Sequence: Synthetic oligonucleotide
ctcacttctctctctgggtc

SEQ ID NO: 9519 - DNA, 20 bp, Artificial Sequence
  Description of Artificial Sequence: Synthetic oligonucleotide
tcacttctctctctgggtcc

SEQ ID NO: 9520 - DNA, 20 bp, Artificial Sequence
  Description of Artificial Sequence: Synthetic oligonucleotide
cacttctctctctgggtccc

SEQ ID NO: 9521 - DNA, 20 bp, Artificial Sequence
  Description of Artificial Sequence: Synthetic oligonucleotide
acttctctctctgggtccca

SEQ ID NO: 9522 - DNA, 20 bp, Artificial Sequence
  Description of Artificial Sequence: Synthetic oligonucleotide
cttctctctctgggtcccag

SEQ ID NO: 9523 - DNA, 20 bp, Artificial Sequence
  Description of Artificial Sequence: Synthetic oligonucleotide
ttctctctctgggtcccagc

SEQ ID NO: 9524 - DNA, 20 bp, Artificial Sequence
  Description of Artificial Sequence: Synthetic oligonucleotide
tctctctctgggtcccagct

SEQ ID NO: 9525 - DNA, 20 bp, Artificial Sequence
  Description of Artificial Sequence: Synthetic oligonucleotide
ctctctctgggtcccagctt

SEQ ID NO: 9526 - DNA, 20 bp, Artificial Sequence
  Description of Artificial Sequence: Synthetic oligonucleotide
tctctctgggtcccagcttc

SEQ ID NO: 9527 - DNA, 20 bp, Artificial Sequence
  Description of Artificial Sequence: Synthetic oligonucleotide
ctctctgggtcccagcttct

SEQ ID NO: 9528 - DNA, 20 bp, Artificial Sequence
  Description of Artificial Sequence: Synthetic oligonucleotide
tctctgggtcccagcttctg

SEQ ID NO: 9529 - DNA, 20 bp, Artificial Sequence
  Description of Artificial Sequence: Synthetic oligonucleotide
ctctgggtcccagcttctgg

SEQ ID NO: 9530 - DNA, 20 bp, Artificial Sequence
  Description of Artificial Sequence: Synthetic oligonucleotide
tctgggtcccagcttctgga

SEQ ID NO: 9531 - DNA, 20 bp, Artificial Sequence
  Description of Artificial Sequence: Synthetic oligonucleotide
ctgggtcccagcttctggaa

SEQ ID NO: 9532 - DNA, 20 bp, Artificial Sequence
  Description of Artificial Sequence: Synthetic oligonucleotide
tgggtcccagcttctggaag

SEQ ID NO: 9533 - DNA, 20 bp, Artificial Sequence
  Description of Artificial Sequence: Synthetic oligonucleotide
gggtcccagcttctggaagg

SEQ ID NO: 9534 - DNA, 20 bp, Artificial Sequence
  Description of Artificial Sequence: Synthetic oligonucleotide
ggtcccagcttctggaagga

SEQ ID NO: 9535 - DNA, 20 bp, Artificial Sequence
  Description of Artificial Sequence: Synthetic oligonucleotide
gtcccagcttctggaaggac

SEQ ID NO: 9536 - DNA, 20 bp, Artificial Sequence
  Description of Artificial Sequence: Synthetic oligonucleotide
tcccagcttctggaaggaca

SEQ ID NO: 9537 - DNA, 20 bp, Artificial Sequence
  Description of Artificial Sequence: Synthetic oligonucleotide
cccagcttctggaaggacac

SEQ ID NO: 9538 - DNA, 20 bp, Artificial Sequence
  Description of Artificial Sequence: Synthetic oligonucleotide
ccagcttctggaaggacacc

SEQ ID NO: 9539 - DNA, 20 bp, Artificial Sequence
  Description of Artificial Sequence: Synthetic oligonucleotide
cagcttctggaaggacaccc

SEQ ID NO: 9540 - DNA, 20 bp, Artificial Sequence
  Description of Artificial Sequence: Synthetic oligonucleotide
agcttctggaaggacaccct

SEQ ID NO: 9541 - DNA, 20 bp, Artificial Sequence
  Description of Artificial Sequence: Synthetic oligonucleotide
gcttctggaaggacaccctg

SEQ ID NO: 9542 - DNA, 20 bp, Artificial Sequence
  Description of Artificial Sequence: Synthetic oligonucleotide
cttctggaaggacaccctgc

SEQ ID NO: 9543 - DNA, 20 bp, Artificial Sequence
  Description of Artificial Sequence: Synthetic oligonucleotide
ttctggaaggacaccctgcc

SEQ ID NO: 9544 - DNA, 20 bp, Artificial Sequence
  Description of Artificial Sequence: Synthetic oligonucleotide
tctggaaggacaccctgcct

SEQ ID NO: 9545 - DNA, 20 bp, Artificial Sequence
  Description of Artificial Sequence: Synthetic oligonucleotide
ctggaaggacaccctgcctt

SEQ ID NO: 9546 - DNA, 20 bp, Artificial Sequence
  Description of Artificial Sequence: Synthetic oligonucleotide
tggaaggacaccctgccttg

SEQ ID NO: 9547 - DNA, 20 bp, Artificial Sequence
  Description of Artificial Sequence: Synthetic oligonucleotide
ggaaggacaccctgccttgc

SEQ ID NO: 9548 - DNA, 20 bp, Artificial Sequence
  Description of Artificial Sequence: Synthetic oligonucleotide
gaaggacaccctgccttgcc

SEQ ID NO: 9549 - DNA, 20 bp, Artificial Sequence
  Description of Artificial Sequence: Synthetic oligonucleotide
aaggacaccctgccttgcct

SEQ ID NO: 9550 - DNA, 20 bp, Artificial Sequence
  Description of Artificial Sequence: Synthetic oligonucleotide
aggacaccctgccttgcctc

SEQ ID NO: 9551 - DNA, 20 bp, Artificial Sequence
  Description of Artificial Sequence: Synthetic oligonucleotide
ggacaccctgccttgcctca

SEQ ID NO: 9552 - DNA, 20 bp, Artificial Sequence
  Description of Artificial Sequence: Synthetic oligonucleotide
gacaccctgccttgcctcac

SEQ ID NO: 9553 - DNA, 20 bp, Artificial Sequence
  Description of Artificial Sequence: Synthetic oligonucleotide
acaccctgccttgcctcacc

SEQ ID NO: 9554 - DNA, 20 bp, Artificial Sequence
  Description of Artificial Sequence: Synthetic oligonucleotide
caccctgccttgcctcaccc

SEQ ID NO: 9555 - DNA, 20 bp, Artificial Sequence
  Description of Artificial Sequence: Synthetic oligonucleotide
accctgccttgcctcacccc

SEQ ID NO: 9556 - DNA, 20 bp, Artificial Sequence
  Description of Artificial Sequence: Synthetic oligonucleotide
ccctgccttgcctcaccccc

SEQ ID NO: 9557 - DNA, 20 bp, Artificial Sequence
  Description of Artificial Sequence: Synthetic oligonucleotide
cctgccttgcctcaccccca

SEQ ID NO: 9558 - DNA, 20 bp, Artificial Sequence
  Description of Artificial Sequence: Synthetic oligonucleotide
ctgccttgcctcacccccag

SEQ ID NO: 9559 - DNA, 20 bp, Artificial Sequence
  Description of Artificial Sequence: Synthetic oligonucleotide
tgccttgcctcacccccaga

SEQ ID NO: 9560 - DNA, 20 bp, Artificial Sequence
  Description of Artificial Sequence: Synthetic oligonucleotide
gccttgcctcacccccagac

SEQ ID NO: 9561 - DNA, 20 bp, Artificial Sequence
  Description of Artificial Sequence: Synthetic oligonucleotide
ccttgcctcacccccagacc

SEQ ID NO: 9562 - DNA, 20 bp, Artificial Sequence
  Description of Artificial Sequence: Synthetic oligonucleotide
cttgcctcacccccagacca

SEQ ID NO: 9563 - DNA, 20 bp, Artificial Sequence
  Description of Artificial Sequence: Synthetic oligonucleotide
ttgcctcacccccagaccag

SEQ ID NO: 9564 - DNA, 20 bp, Artificial Sequence
  Description of Artificial Sequence: Synthetic oligonucleotide
tgcctcacccccagaccagg

SEQ ID NO: 9565 - DNA, 20 bp, Artificial Sequence
  Description of Artificial Sequence: Synthetic oligonucleotide
gcctcacccccagaccaggc

SEQ ID NO: 9566 - DNA, 20 bp, Artificial Sequence
  Description of Artificial Sequence: Synthetic oligonucleotide
cctcacccccagaccaggcc

SEQ ID NO: 9567 - DNA, 20 bp, Artificial Sequence
  Description of Artificial Sequence: Synthetic oligonucleotide
ctcacccccagaccaggcca

SEQ ID NO: 9568 - DNA, 20 bp, Artificial Sequence
  Description of Artificial Sequence: Synthetic oligonucleotide
tcacccccagaccaggccag

SEQ ID NO: 9569 - DNA, 20 bp, Artificial Sequence
  Description of Artificial Sequence: Synthetic oligonucleotide
cacccccagaccaggccaga

SEQ ID NO: 9570 - DNA, 20 bp, Artificial Sequence
  Description of Artificial Sequence: Synthetic oligonucleotide
acccccagaccaggccagaa

SEQ ID NO: 9571 - DNA, 20 bp, Artificial Sequence
  Description of Artificial Sequence: Synthetic oligonucleotide
cccccagaccaggccagaac

SEQ ID NO: 9572 - DNA, 20 bp, Artificial Sequence
  Description of Artificial Sequence: Synthetic oligonucleotide
ccccagaccaggccagaaca

SEQ ID NO: 9573 - DNA, 20 bp, Artificial Sequence
  Description of Artificial Sequence: Synthetic oligonucleotide
cccagaccaggccagaacac

SEQ ID NO: 9574 - DNA, 20 bp, Artificial Sequence
  Description of Artificial Sequence: Synthetic oligonucleotide
ccagaccaggccagaacacc

SEQ ID NO: 9575 - DNA, 20 bp, Artificial Sequence
  Description of Artificial Sequence: Synthetic oligonucleotide
cagaccaggccagaacaccc

SEQ ID NO: 9576 - DNA, 20 bp, Artificial Sequence
  Description of Artificial Sequence: Synthetic oligonucleotide
agaccaggccagaacacccc

SEQ ID NO: 9577 - DNA, 20 bp, Artificial Sequence
  Description of Artificial Sequence: Synthetic oligonucleotide
gaccaggccagaacacccca

SEQ ID NO: 9578 - DNA, 20 bp, Artificial Sequence
  Description of Artificial Sequence: Synthetic oligonucleotide
accaggccagaacaccccaa

SEQ ID NO: 9579 - DNA, 20 bp, Artificial Sequence
  Description of Artificial Sequence: Synthetic oligonucleotide
ccaggccagaacaccccaaa

SEQ ID NO: 9580 - DNA, 20 bp, Artificial Sequence
  Description of Artificial Sequence: Synthetic oligonucleotide
caggccagaacaccccaaat

SEQ ID NO: 9581 - DNA, 20 bp, Artificial Sequence
  Description of Artificial Sequence: Synthetic oligonucleotide
aggccagaacaccccaaatg

SEQ ID NO: 9582 - DNA, 20 bp, Artificial Sequence
  Description of Artificial Sequence: Synthetic oligonucleotide
ggccagaacaccccaaatgg

SEQ ID NO: 9583 - DNA, 20 bp, Artificial Sequence
  Description of Artificial Sequence: Synthetic oligonucleotide
gccagaacaccccaaatggg

SEQ ID NO: 9584 - DNA, 20 bp, Artificial Sequence
  Description of Artificial Sequence: Synthetic oligonucleotide
ccagaacaccccaaatggga

SEQ ID NO: 9585 - DNA, 20 bp, Artificial Sequence
  Description of Artificial Sequence: Synthetic oligonucleotide
cagaacaccccaaatgggaa

SEQ ID NO: 9586 - DNA, 20 bp, Artificial Sequence
  Description of Artificial Sequence: Synthetic oligonucleotide
agaacaccccaaatgggaat

SEQ ID NO: 9587 - DNA, 20 bp, Artificial Sequence
  Description of Artificial Sequence: Synthetic oligonucleotide
gaacaccccaaatgggaatt

SEQ ID NO: 9588 - DNA, 20 bp, Artificial Sequence
  Description of Artificial Sequence: Synthetic oligonucleotide
aacaccccaaatgggaattg

SEQ ID NO: 9589 - DNA, 20 bp, Artificial Sequence
  Description of Artificial Sequence: Synthetic oligonucleotide
acaccccaaatgggaattga

SEQ ID NO: 9590 - DNA, 20 bp, Artificial Sequence
  Description of Artificial Sequence: Synthetic oligonucleotide
caccccaaatgggaattgag

SEQ ID NO: 9591 - DNA, 20 bp, Artificial Sequence
  Description of Artificial Sequence: Synthetic oligonucleotide
accccaaatgggaattgagc

SEQ ID NO: 9592 - DNA, 20 bp, Artificial Sequence
  Description of Artificial Sequence: Synthetic oligonucleotide
ccccaaatgggaattgagca

SEQ ID NO: 9593 - DNA, 20 bp, Artificial Sequence
  Description of Artificial Sequence: Synthetic oligonucleotide
cccaaatgggaattgagcaa

SEQ ID NO: 9594 - DNA, 20 bp, Artificial Sequence
  Description of Artificial Sequence: Synthetic oligonucleotide
ccaaatgggaattgagcaag

SEQ ID NO: 9595 - DNA, 20 bp, Artificial Sequence
  Description of Artificial Sequence: Synthetic oligonucleotide
caaatgggaattgagcaagg

SEQ ID NO: 9596 - DNA, 20 bp, Artificial Sequence
  Description of Artificial Sequence: Synthetic oligonucleotide
aaatgggaattgagcaagga

SEQ ID NO: 9597 - DNA, 20 bp, Artificial Sequence
  Description of Artificial Sequence: Synthetic oligonucleotide
aatgggaattgagcaaggac

SEQ ID NO: 9598 - DNA, 20 bp, Artificial Sequence
  Description of Artificial Sequence: Synthetic oligonucleotide
atgggaattgagcaaggact

SEQ ID NO: 9599 - DNA, 20 bp, Artificial Sequence
  Description of Artificial Sequence: Synthetic oligonucleotide
tgggaattgagcaaggactt

SEQ ID NO: 9600 - DNA, 20 bp, Artificial Sequence
  Description of Artificial Sequence: Synthetic oligonucleotide
gggaattgagcaaggacttc

SEQ ID NO: 9601 - DNA, 20 bp, Artificial Sequence
  Description of Artificial Sequence: Synthetic oligonucleotide
ggaattgagcaaggacttcc

SEQ ID NO: 9602 - DNA, 20 bp, Artificial Sequence
  Description of Artificial Sequence: Synthetic oligonucleotide
gaattgagcaaggacttccc

SEQ ID NO: 9603 - DNA, 20 bp, Artificial Sequence
  Description of Artificial Sequence: Synthetic oligonucleotide
aattgagcaaggacttccca

SEQ ID NO: 9604 - DNA, 20 bp, Artificial Sequence
  Description of Artificial Sequence: Synthetic oligonucleotide
attgagcaaggacttcccac

SEQ ID NO: 9605 - DNA, 20 bp, Artificial Sequence
  Description of Artificial Sequence: Synthetic oligonucleotide
ttgagcaaggacttcccact

SEQ ID NO: 9606 - DNA, 20 bp, Artificial Sequence
  Description of Artificial Sequence: Synthetic oligonucleotide
tgagcaaggacttcccactc

SEQ ID NO: 9607 - DNA, 20 bp, Artificial Sequence
  Description of Artificial Sequence: Synthetic oligonucleotide
gagcaaggacttcccactcc

SEQ ID NO: 9608 - DNA, 20 bp, Artificial Sequence
  Description of Artificial Sequence: Synthetic oligonucleotide
agcaaggacttcccactcct

SEQ ID NO: 9609 - DNA, 20 bp, Artificial Sequence
  Description of Artificial Sequence: Synthetic oligonucleotide
gcaaggacttcccactcctg

SEQ ID NO: 9610 - DNA, 20 bp, Artificial Sequence
  Description of Artificial Sequence: Synthetic oligonucleotide
caaggacttcccactcctgg

SEQ ID NO: 9611 - DNA, 20 bp, Artificial Sequence
  Description of Artificial Sequence: Synthetic oligonucleotide
aaggacttcccactcctgga

SEQ ID NO: 9612 - DNA, 20 bp, Artificial Sequence
  Description of Artificial Sequence: Synthetic oligonucleotide
aggacttcccactcctggac

SEQ ID NO: 9613 - DNA, 20 bp, Artificial Sequence
  Description of Artificial Sequence: Synthetic oligonucleotide
ggacttcccactcctggaca

SEQ ID NO: 9614 - DNA, 20 bp, Artificial Sequence
  Description of Artificial Sequence: Synthetic oligonucleotide
gacttcccactcctggacac

SEQ ID NO: 9615 - DNA, 20 bp, Artificial Sequence
  Description of Artificial Sequence: Synthetic oligonucleotide
acttcccactcctggacact

SEQ ID NO: 9616 - DNA, 20 bp, Artificial Sequence
  Description of Artificial Sequence: Synthetic oligonucleotide
cttcccactcctggacactg

SEQ ID NO: 9617 - DNA, 20 bp, Artificial Sequence
  Description of Artificial Sequence: Synthetic oligonucleotide
ttcccactcctggacactga

SEQ ID NO: 9618 - DNA, 20 bp, Artificial Sequence
  Description of Artificial Sequence: Synthetic oligonucleotide
tcccactcctggacactgag

SEQ ID NO: 9619 - DNA, 20 bp, Artificial Sequence
  Description of Artificial Sequence: Synthetic oligonucleotide
cccactcctggacactgagg

SEQ ID NO: 9620 - DNA, 20 bp, Artificial Sequence
  Description of Artificial Sequence: Synthetic oligonucleotide
ccactcctggacactgaggt

SEQ ID NO: 9621 - DNA, 20 bp, Artificial Sequence
  Description of Artificial Sequence: Synthetic oligonucleotide
cactcctggacactgaggtc

SEQ ID NO: 9622 - DNA, 20 bp, Artificial Sequence
  Description of Artificial Sequence: Synthetic oligonucleotide
actcctggacactgaggtca

SEQ ID NO: 9623 - DNA, 20 bp, Artificial Sequence
  Description of Artificial Sequence: Synthetic oligonucleotide
ctcctggacactgaggtcat

SEQ ID NO: 9624 - DNA, 20 bp, Artificial Sequence
  Description of Artificial Sequence: Synthetic oligonucleotide
tcctggacactgaggtcatc

SEQ ID NO: 9625 - DNA, 20 bp, Artificial Sequence
  Description of Artificial Sequence: Synthetic oligonucleotide
cctggacactgaggtcatct

SEQ ID NO: 9626 - DNA, 20 bp, Artificial Sequence
  Description of Artificial Sequence: Synthetic oligonucleotide
ctggacactgaggtcatcta

SEQ ID NO: 9627 - DNA, 20 bp, Artificial Sequence
  Description of Artificial Sequence: Synthetic oligonucleotide
tggacactgaggtcatctaa

SEQ ID NO: 9628 - DNA, 20 bp, Artificial Sequence
  Description of Artificial Sequence: Synthetic oligonucleotide
ggacactgaggtcatctaat

SEQ ID NO: 9629 - DNA, 20 bp, Artificial Sequence
  Description of Artificial Sequence: Synthetic oligonucleotide
gacactgaggtcatctaatg

SEQ ID NO: 9630 - DNA, 20 bp, Artificial Sequence
  Description of Artificial Sequence: Synthetic oligonucleotide
acactgaggtcatctaatgg

SEQ ID NO: 9631 - DNA, 20 bp, Artificial Sequence
  Description of Artificial Sequence: Synthetic oligonucleotide
cactgaggtcatctaatggt

SEQ ID NO: 9632 - DNA, 20 bp, Artificial Sequence
  Description of Artificial Sequence: Synthetic oligonucleotide
actgaggtcatctaatggtc

SEQ ID NO: 9633 - DNA, 20 bp, Artificial Sequence
  Description of Artificial Sequence: Synthetic oligonucleotide
ctgaggtcatctaatggtct

SEQ ID NO: 9634 - DNA, 20 bp, Artificial Sequence
  Description of Artificial Sequence: Synthetic oligonucleotide
tgaggtcatctaatggtctc

SEQ ID NO: 9635 - DNA, 20 bp, Artificial Sequence
  Description of Artificial Sequence: Synthetic oligonucleotide
gaggtcatctaatggtctct

SEQ ID NO: 9636 - DNA, 20 bp, Artificial Sequence
  Description of Artificial Sequence: Synthetic oligonucleotide
aggtcatctaatggtctctc

SEQ ID NO: 9637 - DNA, 20 bp, Artificial Sequence
  Description of Artificial Sequence: Synthetic oligonucleotide
ggtcatctaatggtctctcc

SEQ ID NO: 9638 - DNA, 20 bp, Artificial Sequence
  Description of Artificial Sequence: Synthetic oligonucleotide
gtcatctaatggtctctcct

SEQ ID NO: 9639 - DNA, 20 bp, Artificial Sequence
  Description of Artificial Sequence: Synthetic oligonucleotide
tcatctaatggtctctcctc

SEQ ID NO: 9640 - DNA, 20 bp, Artificial Sequence
  Description of Artificial Sequence: Synthetic oligonucleotide
catctaatggtctctcctct

SEQ ID NO: 9641 - DNA, 20 bp, Artificial Sequence
  Description of Artificial Sequence: Synthetic oligonucleotide
atctaatggtctctcctctg

SEQ ID NO: 9642 - DNA, 20 bp, Artificial Sequence
  Description of Artificial Sequence: Synthetic oligonucleotide
tctaatggtctctcctctga

SEQ ID NO: 9643 - DNA, 20 bp, Artificial Sequence
  Description of Artificial Sequence: Synthetic oligonucleotide
ctaatggtctctcctctgac

SEQ ID NO: 9644 - DNA, 20 bp, Artificial Sequence
  Description of Artificial Sequence: Synthetic oligonucleotide
taatggtctctcctctgact

SEQ ID NO: 9645 - DNA, 20 bp, Artificial Sequence
  Description of Artificial Sequence: Synthetic oligonucleotide
aatggtctctcctctgactc

SEQ ID NO: 9646 - DNA, 20 bp, Artificial Sequence
  Description of Artificial Sequence: Synthetic oligonucleotide
atggtctctcctctgactca

SEQ ID NO: 9647 - DNA, 20 bp, Artificial Sequence
  Description of Artificial Sequence: Synthetic oligonucleotide
tggtctctcctctgactcaa

SEQ ID NO: 9648 - DNA, 20 bp, Artificial Sequence
  Description of Artificial Sequence: Synthetic oligonucleotide
ggtctctcctctgactcaat

SEQ ID NO: 9649 - DNA, 20 bp, Artificial Sequence
  Description of Artificial Sequence: Synthetic oligonucleotide
gtctctcctctgactcaatg

SEQ ID NO: 9650 - DNA, 20 bp, Artificial Sequence
  Description of Artificial Sequence: Synthetic oligonucleotide
tctctcctctgactcaatgg

SEQ ID NO: 9651 - DNA, 20 bp, Artificial Sequence
  Description of Artificial Sequence: Synthetic oligonucleotide
ctctcctctgactcaatgga

SEQ ID NO: 9652 - DNA, 20 bp, Artificial Sequence
  Description of Artificial Sequence: Synthetic oligonucleotide
tctcctctgactcaatggag

SEQ ID NO: 9653 - DNA, 20 bp, Artificial Sequence
  Description of Artificial Sequence: Synthetic oligonucleotide
ctcctctgactcaatggagg

SEQ ID NO: 9654 - DNA, 20 bp, Artificial Sequence
  Description of Artificial Sequence: Synthetic oligonucleotide
tcctctgactcaatggaggc

SEQ ID NO: 9655 - DNA, 20 bp, Artificial Sequence
  Description of Artificial Sequence: Synthetic oligonucleotide
cctctgactcaatggaggct

SEQ ID NO: 9656 - DNA, 20 bp, Artificial Sequence
  Description of Artificial Sequence: Synthetic oligonucleotide
ctctgactcaatggaggctc

SEQ ID NO: 9657 - DNA, 20 bp, Artificial Sequence
  Description of Artificial Sequence: Synthetic oligonucleotide
tctgactcaatggaggctcc

SEQ ID NO: 9658 - DNA, 20 bp, Artificial Sequence
  Description of Artificial Sequence: Synthetic oligonucleotide
ctgactcaatggaggctcca

SEQ ID NO: 9659 - DNA, 20 bp, Artificial Sequence
  Description of Artificial Sequence: Synthetic oligonucleotide
tgactcaatggaggctccat

SEQ ID NO: 9660 - DNA, 20 bp, Artificial Sequence
  Description of Artificial Sequence: Synthetic oligonucleotide
gactcaatggaggctccatg

SEQ ID NO: 9661 - DNA, 20 bp, Artificial Sequence
  Description of Artificial Sequence: Synthetic oligonucleotide
actcaatggaggctccatga

SEQ ID NO: 9662 - DNA, 20 bp, Artificial Sequence
  Description of Artificial Sequence: Synthetic oligonucleotide
ctcaatggaggctccatgag

SEQ ID NO: 9663 - DNA, 20 bp, Artificial Sequence
  Description of Artificial Sequence: Synthetic oligonucleotide
tcaatggaggctccatgagg

SEQ ID NO: 9664 - DNA, 20 bp, Artificial Sequence
  Description of Artificial Sequence: Synthetic oligonucleotide
caatggaggctccatgaggc

SEQ ID NO: 9665 - DNA, 20 bp, Artificial Sequence
  Description of Artificial Sequence: Synthetic oligonucleotide
aatggaggctccatgaggct

SEQ ID NO: 9666 - DNA, 20 bp, Artificial Sequence
  Description of Artificial Sequence: Synthetic oligonucleotide
atggaggctccatgaggctg

SEQ ID NO: 9667 - DNA, 20 bp, Artificial Sequence
  Description of Artificial Sequence: Synthetic oligonucleotide
tggaggctccatgaggctgg

SEQ ID NO: 9668 - DNA, 20 bp, Artificial Sequence
  Description of Artificial Sequence: Synthetic oligonucleotide
ggaggctccatgaggctggg

SEQ ID NO: 9669 - DNA, 20 bp, Artificial Sequence
  Description of Artificial Sequence: Synthetic oligonucleotide
gaggctccatgaggctgggg

SEQ ID NO: 9670 - DNA, 20 bp, Artificial Sequence
  Description of Artificial Sequence: Synthetic oligonucleotide
aggctccatgaggctgggga

SEQ ID NO: 9671 - DNA, 20 bp, Artificial Sequence
  Description of Artificial Sequence: Synthetic oligonucleotide
ggctccatgaggctggggac

SEQ ID NO: 9672 - DNA, 20 bp, Artificial Sequence
  Description of Artificial Sequence: Synthetic oligonucleotide
gctccatgaggctggggaca

SEQ ID NO: 9673 - DNA, 20 bp, Artificial Sequence
  Description of Artificial Sequence: Synthetic oligonucleotide
ctccatgaggctggggacaa

SEQ ID NO: 9674 - DNA, 20 bp, Artificial Sequence
  Description of Artificial Sequence: Synthetic oligonucleotide
tccatgaggctggggacaag

SEQ ID NO: 9675 - DNA, 20 bp, Artificial Sequence
  Description of Artificial Sequence: Synthetic oligonucleotide
ccatgaggctggggacaagg

SEQ ID NO: 9676 - DNA, 20 bp, Artificial Sequence
  Description of Artificial Sequence: Synthetic oligonucleotide
catgaggctggggacaagga

SEQ ID NO: 9677 - DNA, 20 bp, Artificial Sequence
  Description of Artificial Sequence: Synthetic oligonucleotide
atgaggctggggacaaggag

SEQ ID NO: 9678 - DNA, 20 bp, Artificial Sequence
  Description of Artificial Sequence: Synthetic oligonucleotide
tgaggctggggacaaggagc

SEQ ID NO: 9679 - DNA, 20 bp, Artificial Sequence
  Description of Artificial Sequence: Synthetic oligonucleotide
gaggctggggacaaggagca

SEQ ID NO: 9680 - DNA, 20 bp, Artificial Sequence
  Description of Artificial Sequence: Synthetic oligonucleotide
aggctggggacaaggagcag

SEQ ID NO: 9681 - DNA, 20 bp, Artificial Sequence
  Description of Artificial Sequence: Synthetic oligonucleotide
ggctggggacaaggagcagc

SEQ ID NO: 9682 - DNA, 20 bp, Artificial Sequence
  Description of Artificial Sequence: Synthetic oligonucleotide
gctggggacaaggagcagct

SEQ ID NO: 9683 - DNA, 20 bp, Artificial Sequence
  Description of Artificial Sequence: Synthetic oligonucleotide
ctggggacaaggagcagctc

SEQ ID NO: 9684 - DNA, 20 bp, Artificial Sequence
  Description of Artificial Sequence: Synthetic oligonucleotide
tggggacaaggagcagctct

SEQ ID NO: 9685 - DNA, 20 bp, Artificial Sequence
  Description of Artificial Sequence: Synthetic oligonucleotide
ggggacaaggagcagctctg

SEQ ID NO: 9686 - DNA, 20 bp, Artificial Sequence
  Description of Artificial Sequence: Synthetic oligonucleotide
gggacaaggagcagctctgc

SEQ ID NO: 9687 - DNA, 20 bp, Artificial Sequence
  Description of Artificial Sequence: Synthetic oligonucleotide
ggacaaggagcagctctgcc

SEQ ID NO: 9688 - DNA, 20 bp, Artificial Sequence
  Description of Artificial Sequence: Synthetic oligonucleotide
gacaaggagcagctctgccc

SEQ ID NO: 9689 - DNA, 20 bp, Artificial Sequence
  Description of Artificial Sequence: Synthetic oligonucleotide
acaaggagcagctctgccca

SEQ ID NO: 9690 - DNA, 20 bp, Artificial Sequence
  Description of Artificial Sequence: Synthetic oligonucleotide
caaggagcagctctgcccac

SEQ ID NO: 9691 - DNA, 20 bp, Artificial Sequence
  Description of Artificial Sequence: Synthetic oligonucleotide
aaggagcagctctgcccaca

SEQ ID NO: 9692 - DNA, 20 bp, Artificial Sequence
  Description of Artificial Sequence: Synthetic oligonucleotide
aggagcagctctgcccacag

SEQ ID NO: 9693 - DNA, 20 bp, Artificial Sequence
  Description of Artificial Sequence: Synthetic oligonucleotide
ggagcagctctgcccacagc

SEQ ID NO: 9694 - DNA, 20 bp, Artificial Sequence
  Description of Artificial Sequence: Synthetic oligonucleotide
gagcagctctgcccacagcc

SEQ ID NO: 9695 - DNA, 20 bp, Artificial Sequence
  Description of Artificial Sequence: Synthetic oligonucleotide
agcagctctgcccacagcct

SEQ ID NO: 9696 - DNA, 20 bp, Artificial Sequence
  Description of Artificial Sequence: Synthetic oligonucleotide
gcagctctgcccacagcctg

SEQ ID NO: 9697 - DNA, 20 bp, Artificial Sequence
  Description of Artificial Sequence: Synthetic oligonucleotide
cagctctgcccacagcctgg

SEQ ID NO: 9698 - DNA, 20 bp, Artificial Sequence
  Description of Artificial Sequence: Synthetic oligonucleotide
agctctgcccacagcctggc

SEQ ID NO: 9699 - DNA, 20 bp, Artificial Sequence
  Description of Artificial Sequence: Synthetic oligonucleotide
gctctgcccacagcctggca

SEQ ID NO: 9700 - DNA, 20 bp, Artificial Sequence
  Description of Artificial Sequence: Synthetic oligonucleotide
ctctgcccacagcctggcac

SEQ ID NO: 9701 - DNA, 20 bp, Artificial Sequence
  Description of Artificial Sequence: Synthetic oligonucleotide
tctgcccacagcctggcacc

SEQ ID NO: 9702 - DNA, 20 bp, Artificial Sequence
  Description of Artificial Sequence: Synthetic oligonucleotide
ctgcccacagcctggcacca

SEQ ID NO: 9703 - DNA, 20 bp, Artificial Sequence
  Description of Artificial Sequence: Synthetic oligonucleotide
tgcccacagcctggcaccag

SEQ ID NO: 9704 - DNA, 20 bp, Artificial Sequence
  Description of Artificial Sequence: Synthetic oligonucleotide
gcccacagcctggcaccagc

SEQ ID NO: 9705 - DNA, 20 bp, Artificial Sequence
  Description of Artificial Sequence: Synthetic oligonucleotide
cccacagcctggcaccagca

SEQ ID NO: 9706 - DNA, 20 bp, Artificial Sequence
  Description of Artificial Sequence: Synthetic oligonucleotide
ccacagcctggcaccagcat

SEQ ID NO: 9707 - DNA, 20 bp, Artificial Sequence
  Description of Artificial Sequence: Synthetic oligonucleotide
cacagcctggcaccagcatc

SEQ ID NO: 9708 - DNA, 20 bp, Artificial Sequence
  Description of Artificial Sequence: Synthetic oligonucleotide
acagcctggcaccagcatcc

SEQ ID NO: 9709 - DNA, 20 bp, Artificial Sequence
  Description of Artificial Sequence: Synthetic oligonucleotide
cagcctggcaccagcatcca

SEQ ID NO: 9710 - DNA, 20 bp, Artificial Sequence
  Description of Artificial Sequence: Synthetic oligonucleotide
agcctggcaccagcatccac

SEQ ID NO: 9711 - DNA, 20 bp, Artificial Sequence
  Description of Artificial Sequence: Synthetic oligonucleotide
gcctggcaccagcatccacg

SEQ ID NO: 9712 - DNA, 20 bp, Artificial Sequence
  Description of Artificial Sequence: Synthetic oligonucleotide
cctggcaccagcatccacgc

SEQ ID NO: 9713 - DNA, 20 bp, Artificial Sequence
  Description of Artificial Sequence: Synthetic oligonucleotide
ctggcaccagcatccacgca

SEQ ID NO: 9714 - DNA, 20 bp, Artificial Sequence
  Description of Artificial Sequence: Synthetic oligonucleotide
tggcaccagcatccacgcag

SEQ ID NO: 9715 - DNA, 20 bp, Artificial Sequence
  Description of Artificial Sequence: Synthetic oligonucleotide
ggcaccagcatccacgcagg

SEQ ID NO: 9716 - DNA, 20 bp, Artificial Sequence
  Description of Artificial Sequence: Synthetic oligonucleotide
gcaccagcatccacgcaggc

SEQ ID NO: 9717 - DNA, 20 bp, Artificial Sequence
  Description of Artificial Sequence: Synthetic oligonucleotide
caccagcatccacgcaggcc

SEQ ID NO: 9718 - DNA, 20 bp, Artificial Sequence
  Description of Artificial Sequence: Synthetic oligonucleotide
accagcatccacgcaggccc

SEQ ID NO: 9719 - DNA, 20 bp, Artificial Sequence
  Description of Artificial Sequence: Synthetic oligonucleotide
ccagcatccacgcaggcccc

SEQ ID NO: 9720 - DNA, 20 bp, Artificial Sequence
  Description of Artificial Sequence: Synthetic oligonucleotide
cagcatccacgcaggcccca

SEQ ID NO: 9721 - DNA, 20 bp, Artificial Sequence
  Description of Artificial Sequence: Synthetic oligonucleotide
agcatccacgcaggccccag

SEQ ID NO: 9722 - DNA, 20 bp, Artificial Sequence
  Description of Artificial Sequence: Synthetic oligonucleotide
gcatccacgcaggccccagc

SEQ ID NO: 9723 - DNA, 20 bp, Artificial Sequence
  Description of Artificial Sequence: Synthetic oligonucleotide
catccacgcaggccccagcg

SEQ ID NO: 9724 - DNA, 20 bp, Artificial Sequence
  Description of Artificial Sequence: Synthetic oligonucleotide
atccacgcaggccccagcgc

SEQ ID NO: 9725 - DNA, 20 bp, Artificial Sequence
  Description of Artificial Sequence: Synthetic oligonucleotide
tccacgcaggccccagcgca

SEQ ID NO: 9726 - DNA, 20 bp, Artificial Sequence
  Description of Artificial Sequence: Synthetic oligonucleotide
ccacgcaggccccagcgcat

SEQ ID NO: 9727 - DNA, 20 bp, Artificial Sequence
  Description of Artificial Sequence: Synthetic oligonucleotide
cacgcaggccccagcgcata

SEQ ID NO: 9728 - DNA, 20 bp, Artificial Sequence
  Description of Artificial Sequence: Synthetic oligonucleotide
acgcaggccccagcgcatag

SEQ ID NO: 9729 - DNA, 20 bp, Artificial Sequence
  Description of Artificial Sequence: Synthetic oligonucleotide
cgcaggccccagcgcatagc

SEQ ID NO: 9730 - DNA, 20 bp, Artificial Sequence
  Description of Artificial Sequence: Synthetic oligonucleotide
gcaggccccagcgcatagca

SEQ ID NO: 9731 - DNA, 20 bp, Artificial Sequence
  Description of Artificial Sequence: Synthetic oligonucleotide
caggccccagcgcatagcag

SEQ ID NO: 9732 - DNA, 20 bp, Artificial Sequence
  Description of Artificial Sequence: Synthetic oligonucleotide
aggccccagcgcatagcagc

SEQ ID NO: 9733 - DNA, 20 bp, Artificial Sequence
  Description of Artificial Sequence: Synthetic oligonucleotide
ggccccagcgcatagcagct

SEQ ID NO: 9734 - DNA, 20 bp, Artificial Sequence
  Description of Artificial Sequence: Synthetic oligonucleotide
gccccagcgcatagcagctg

SEQ ID NO: 9735 - DNA, 20 bp, Artificial Sequence
  Description of Artificial Sequence: Synthetic oligonucleotide
ccccagcgcatagcagctgc

SEQ ID NO: 9736 - DNA, 20 bp, Artificial Sequence
  Description of Artificial Sequence: Synthetic oligonucleotide
cccagcgcatagcagctgct

SEQ ID NO: 9737 - DNA, 20 bp, Artificial Sequence
  Description of Artificial Sequence: Synthetic oligonucleotide
ccagcgcatagcagctgctc

SEQ ID NO: 9738 - DNA, 20 bp, Artificial Sequence
  Description of Artificial Sequence: Synthetic oligonucleotide
cagcgcatagcagctgctca

SEQ ID NO: 9739 - DNA, 20 bp, Artificial Sequence
  Description of Artificial Sequence: Synthetic oligonucleotide
agcgcatagcagctgctcaa

SEQ ID NO: 9740 - DNA, 20 bp, Artificial Sequence
  Description of Artificial Sequence: Synthetic oligonucleotide
gcgcatagcagctgctcaat

SEQ ID NO: 9741 - DNA, 20 bp, Artificial Sequence
  Description of Artificial Sequence: Synthetic oligonucleotide
cgcatagcagctgctcaata

SEQ ID NO: 9742 - DNA, 20 bp, Artificial Sequence
  Description of Artificial Sequence: Synthetic oligonucleotide
gcatagcagctgctcaataa

SEQ ID NO: 9743 - DNA, 20 bp, Artificial Sequence
  Description of Artificial Sequence: Synthetic oligonucleotide
catagcagctgctcaataaa

SEQ ID NO: 9744 - DNA, 20 bp, Artificial Sequence
  Description of Artificial Sequence: Synthetic oligonucleotide
atagcagctgctcaataaag

SEQ ID NO: 9745 - DNA, 20 bp, Artificial Sequence
  Description of Artificial Sequence: Synthetic oligonucleotide
tagcagctgctcaataaaga

SEQ ID NO: 9746 - DNA, 20 bp, Artificial Sequence
  Description of Artificial Sequence: Synthetic oligonucleotide
agcagctgctcaataaagac

SEQ ID NO: 9747 - DNA, 20 bp, Artificial Sequence
  Description of Artificial Sequence: Synthetic oligonucleotide
gcagctgctcaataaagact

SEQ ID NO: 9748 - DNA, 20 bp, Artificial Sequence
  Description of Artificial Sequence: Synthetic oligonucleotide
cagctgctcaataaagactt

SEQ ID NO: 9749 - DNA, 20 bp, Artificial Sequence
  Description of Artificial Sequence: Synthetic oligonucleotide
agctgctcaataaagacttg

SEQ ID NO: 9750 - DNA, 20 bp, Artificial Sequence
  Description of Artificial Sequence: Synthetic oligonucleotide
gctgctcaataaagacttga

SEQ ID NO: 9751 - DNA, 20 bp, Artificial Sequence
  Description of Artificial Sequence: Synthetic oligonucleotide
ctgctcaataaagacttgag

SEQ ID NO: 9752 - DNA, 20 bp, Artificial Sequence
  Description of Artificial Sequence: Synthetic oligonucleotide
tgctcaataaagacttgagg

SEQ ID NO: 9753 - DNA, 20 bp, Artificial Sequence
  Description of Artificial Sequence: Synthetic oligonucleotide
gctcaataaagacttgagga

SEQ ID NO: 9754 - DNA, 20 bp, Artificial Sequence
  Description of Artificial Sequence: Synthetic oligonucleotide
ctcaataaagacttgaggaa

SEQ ID NO: 9755 - DNA, 20 bp, Artificial Sequence
  Description of Artificial Sequence: Synthetic oligonucleotide
tcaataaagacttgaggaat

SEQ ID NO: 9756 - DNA, 20 bp, Artificial Sequence
  Description of Artificial Sequence: Synthetic oligonucleotide
caataaagacttgaggaatg

SEQ ID NO: 9757 - DNA, 20 bp, Artificial Sequence
  Description of Artificial Sequence: Synthetic oligonucleotide
aataaagacttgaggaatgg

SEQ ID NO: 9758 - DNA, 20 bp, Artificial Sequence
  Description of Artificial Sequence: Synthetic oligonucleotide
ataaagacttgaggaatggg

SEQ ID NO: 9759 - DNA, 20 bp, Artificial Sequence
  Description of Artificial Sequence: Synthetic oligonucleotide
taaagacttgaggaatgggc

SEQ ID NO: 9760 - DNA, 20 bp, Artificial Sequence
  Description of Artificial Sequence: Synthetic oligonucleotide
aaagacttgaggaatgggcc

SEQ ID NO: 9761 - DNA, 20 bp, Artificial Sequence
  Description of Artificial Sequence: Synthetic oligonucleotide
aagacttgaggaatgggccg

SEQ ID NO: 9762 - DNA, 20 bp, Artificial Sequence
  Description of Artificial Sequence: Synthetic oligonucleotide
agacttgaggaatgggccgg

SEQ ID NO: 9763 - DNA, 20 bp, Artificial Sequence
  Description of Artificial Sequence: Synthetic oligonucleotide
gacttgaggaatgggccggg

SEQ ID NO: 9764 - DNA, 20 bp, Artificial Sequence
  Description of Artificial Sequence: Synthetic oligonucleotide
acttgaggaatgggccgggc

SEQ ID NO: 9765 - DNA, 20 bp, Artificial Sequence
  Description of Artificial Sequence: Synthetic oligonucleotide
cttgaggaatgggccgggcg

SEQ ID NO: 9766 - DNA, 20 bp, Artificial Sequence
  Description of Artificial Sequence: Synthetic oligonucleotide
ttgaggaatgggccgggcgc

SEQ ID NO: 9767 - DNA, 20 bp, Artificial Sequence
  Description of Artificial Sequence: Synthetic oligonucleotide
tgaggaatgggccgggcgca

SEQ ID NO: 9768 - DNA, 20 bp, Artificial Sequence
  Description of Artificial Sequence: Synthetic oligonucleotide
gaggaatgggccgggcgcag

SEQ ID NO: 9769 - DNA, 20 bp, Artificial Sequence
  Description of Artificial Sequence: Synthetic oligonucleotide
aggaatgggccgggcgcagt

SEQ ID NO: 9770 - DNA, 20 bp, Artificial Sequence
  Description of Artificial Sequence: Synthetic oligonucleotide
ggaatgggccgggcgcagtg

SEQ ID NO: 9771 - DNA, 20 bp, Artificial Sequence
  Description of Artificial Sequence: Synthetic oligonucleotide
gaatgggccgggcgcagtgg

SEQ ID NO: 9772 - DNA, 20 bp, Artificial Sequence
  Description of Artificial Sequence: Synthetic oligonucleotide
aatgggccgggcgcagtggt

SEQ ID NO: 9773 - DNA, 20 bp, Artificial Sequence
  Description of Artificial Sequence: Synthetic oligonucleotide
atgggccgggcgcagtggtt

SEQ ID NO: 9774 - DNA, 20 bp, Artificial Sequence
  Description of Artificial Sequence: Synthetic oligonucleotide
tgggccgggcgcagtggttc

SEQ ID NO: 9775 - DNA, 20 bp, Artificial Sequence
  Description of Artificial Sequence: Synthetic oligonucleotide
gggccgggcgcagtggttca

SEQ ID NO: 9776 - DNA, 20 bp, Artificial Sequence
  Description of Artificial Sequence: Synthetic oligonucleotide
ggccgggcgcagtggttcat

SEQ ID NO: 9777 - DNA, 20 bp, Artificial Sequence
  Description of Artificial Sequence: Synthetic oligonucleotide
gccgggcgcagtggttcatg

SEQ ID NO: 9778 - DNA, 20 bp, Artificial Sequence
  Description of Artificial Sequence: Synthetic oligonucleotide
ccgggcgcagtggttcatgc

SEQ ID NO: 9779 - DNA, 20 bp, Artificial Sequence
  Description of Artificial Sequence: Synthetic oligonucleotide
cgggcgcagtggttcatgcc

SEQ ID NO: 9780 - DNA, 20 bp, Artificial Sequence
  Description of Artificial Sequence: Synthetic oligonucleotide
gggcgcagtggttcatgcct

SEQ ID NO: 9781 - DNA, 20 bp, Artificial Sequence
  Description of Artificial Sequence: Synthetic oligonucleotide
ggcgcagtggttcatgcctg

SEQ ID NO: 9782 - DNA, 20 bp, Artificial Sequence
  Description of Artificial Sequence: Synthetic oligonucleotide
gcgcagtggttcatgcctgt

SEQ ID NO: 9783 - DNA, 20 bp, Artificial Sequence
  Description of Artificial Sequence: Synthetic oligonucleotide
cgcagtggttcatgcctgta

SEQ ID NO: 9784 - DNA, 20 bp, Artificial Sequence
  Description of Artificial Sequence: Synthetic oligonucleotide
gcagtggttcatgcctgtaa

SEQ ID NO: 9785 - DNA, 20 bp, Artificial Sequence
  Description of Artificial Sequence: Synthetic oligonucleotide
cagtggttcatgcctgtaat

SEQ ID NO: 9786 - DNA, 20 bp, Artificial Sequence
  Description of Artificial Sequence: Synthetic oligonucleotide
agtggttcatgcctgtaatc

SEQ ID NO: 9787 - DNA, 20 bp, Artificial Sequence
  Description of Artificial Sequence: Synthetic oligonucleotide
gtggttcatgcctgtaatcc

SEQ ID NO: 9788 - DNA, 20 bp, Artificial Sequence
  Description of Artificial Sequence: Synthetic oligonucleotide
tggttcatgcctgtaatcca

SEQ ID NO: 9789 - DNA, 20 bp, Artificial Sequence
  Description of Artificial Sequence: Synthetic oligonucleotide
ggttcatgcctgtaatccag

SEQ ID NO: 9790 - DNA, 20 bp, Artificial Sequence
  Description of Artificial Sequence: Synthetic oligonucleotide
gttcatgcctgtaatccagc

SEQ ID NO: 9791 - DNA, 20 bp, Artificial Sequence
  Description of Artificial Sequence: Synthetic oligonucleotide
ttcatgcctgtaatccagca

SEQ ID NO: 9792 - DNA, 20 bp, Artificial Sequence
  Description of Artificial Sequence: Synthetic oligonucleotide
tcatgcctgtaatccagcac

SEQ ID NO: 9793 - DNA, 20 bp, Artificial Sequence
  Description of Artificial Sequence: Synthetic oligonucleotide
catgcctgtaatccagcact

SEQ ID NO: 9794 - DNA, 20 bp, Artificial Sequence
  Description of Artificial Sequence: Synthetic oligonucleotide
atgcctgtaatccagcactt

SEQ ID NO: 9795 - DNA, 20 bp, Artificial Sequence
  Description of Artificial Sequence: Synthetic oligonucleotide
tgcctgtaatccagcacttt

SEQ ID NO: 9796 - DNA, 20 bp, Artificial Sequence
  Description of Artificial Sequence: Synthetic oligonucleotide
gcctgtaatccagcactttg

SEQ ID NO: 9797 - DNA, 20 bp, Artificial Sequence
  Description of Artificial Sequence: Synthetic oligonucleotide
cctgtaatccagcactttgg

SEQ ID NO: 9798 - DNA, 20 bp, Artificial Sequence
  Description of Artificial Sequence: Synthetic oligonucleotide
ctgtaatccagcactttggg

SEQ ID NO: 9799 - DNA, 20 bp, Artificial Sequence
  Description of Artificial Sequence: Synthetic oligonucleotide
tgtaatccagcactttggga

SEQ ID NO: 9800 - DNA, 20 bp, Artificial Sequence
  Description of Artificial Sequence: Synthetic oligonucleotide
gtaatccagcactttgggag

SEQ ID NO: 9801 - DNA, 20 bp, Artificial Sequence
  Description of Artificial Sequence: Synthetic oligonucleotide
taatccagcactttgggagg

SEQ ID NO: 9802 - DNA, 20 bp, Artificial Sequence
  Description of Artificial Sequence: Synthetic oligonucleotide
aatccagcactttgggaggc

SEQ ID NO: 9803 - DNA, 20 bp, Artificial Sequence
  Description of Artificial Sequence: Synthetic oligonucleotide
atccagcactttgggaggcg

SEQ ID NO: 9804 - DNA, 20 bp, Artificial Sequence
  Description of Artificial Sequence: Synthetic oligonucleotide
tccagcactttgggaggcgg

SEQ ID NO: 9805 - DNA, 20 bp, Artificial Sequence
  Description of Artificial Sequence: Synthetic oligonucleotide
ccagcactttgggaggcggg

SEQ ID NO: 9806 - DNA, 20 bp, Artificial Sequence
  Description of Artificial Sequence: Synthetic oligonucleotide
cagcactttgggaggcgggc

SEQ ID NO: 9807 - DNA, 20 bp, Artificial Sequence
  Description of Artificial Sequence: Synthetic oligonucleotide
agcactttgggaggcgggcg

SEQ ID NO: 9808 - DNA, 20 bp, Artificial Sequence
  Description of Artificial Sequence: Synthetic oligonucleotide
gcactttgggaggcgggcgg

SEQ ID NO: 9809 - DNA, 20 bp, Artificial Sequence
  Description of Artificial Sequence: Synthetic oligonucleotide
cactttgggaggcgggcgga

SEQ ID NO: 9810 - DNA, 20 bp, Artificial Sequence
  Description of Artificial Sequence: Synthetic oligonucleotide
actttgggaggcgggcggat

SEQ ID NO: 9811 - DNA, 20 bp, Artificial Sequence
  Description of Artificial Sequence: Synthetic oligonucleotide
ctttgggaggcgggcggatc

SEQ ID NO: 9812 - DNA, 20 bp, Artificial Sequence
  Description of Artificial Sequence: Synthetic oligonucleotide
tttgggaggcgggcggatcg

SEQ ID NO: 9813 - DNA, 20 bp, Artificial Sequence
  Description of Artificial Sequence: Synthetic oligonucleotide
ttgggaggcgggcggatcgg

SEQ ID NO: 9814 - DNA, 20 bp, Artificial Sequence
  Description of Artificial Sequence: Synthetic oligonucleotide
tgggaggcgggcggatcggt

SEQ ID NO: 9815 - DNA, 20 bp, Artificial Sequence
  Description of Artificial Sequence: Synthetic oligonucleotide
gggaggcgggcggatcggtc

SEQ ID NO: 9816 - DNA, 20 bp, Artificial Sequence
  Description of Artificial Sequence: Synthetic oligonucleotide
ggaggcgggcggatcggtca

SEQ ID NO: 9817 - DNA, 20 bp, Artificial Sequence
  Description of Artificial Sequence: Synthetic oligonucleotide
gaggcgggcggatcggtcag

SEQ ID NO: 9818 - DNA, 20 bp, Artificial Sequence
  Description of Artificial Sequence: Synthetic oligonucleotide
aggcgggcggatcggtcagg

SEQ ID NO: 9819 - DNA, 20 bp, Artificial Sequence
  Description of Artificial Sequence: Synthetic oligonucleotide
ggcgggcggatcggtcagga

SEQ ID NO: 9820 - DNA, 20 bp, Artificial Sequence
  Description of Artificial Sequence: Synthetic oligonucleotide
gcgggcggatcggtcaggag

SEQ ID NO: 9821 - DNA, 20 bp, Artificial Sequence
  Description of Artificial Sequence: Synthetic oligonucleotide
cgggcggatcggtcaggagt

SEQ ID NO: 9822 - DNA, 20 bp, Artificial Sequence
  Description of Artificial Sequence: Synthetic oligonucleotide
gggcggatcggtcaggagtt

SEQ ID NO: 9823 - DNA, 20 bp, Artificial Sequence
  Description of Artificial Sequence: Synthetic oligonucleotide
ggcggatcggtcaggagttt

SEQ ID NO: 9824 - DNA, 20 bp, Artificial Sequence
  Description of Artificial Sequence: Synthetic oligonucleotide
gcggatcggtcaggagtttg

SEQ ID NO: 9825 - DNA, 20 bp, Artificial Sequence
  Description of Artificial Sequence: Synthetic oligonucleotide
cggatcggtcaggagtttga

SEQ ID NO: 9826 - DNA, 20 bp, Artificial Sequence
  Description of Artificial Sequence: Synthetic oligonucleotide
ggatcggtcaggagtttgag

SEQ ID NO: 9827 - DNA, 20 bp, Artificial Sequence
  Description of Artificial Sequence: Synthetic oligonucleotide
gatcggtcaggagtttgaga

SEQ ID NO: 9828 - DNA, 20 bp, Artificial Sequence
  Description of Artificial Sequence: Synthetic oligonucleotide
atcggtcaggagtttgagac

SEQ ID NO: 9829 - DNA, 20 bp, Artificial Sequence
  Description of Artificial Sequence: Synthetic oligonucleotide
tcggtcaggagtttgagacc

SEQ ID NO: 9830 - DNA, 20 bp, Artificial Sequence
  Description of Artificial Sequence: Synthetic oligonucleotide
cggtcaggagtttgagacca

SEQ ID NO: 9831 - DNA, 20 bp, Artificial Sequence
  Description of Artificial Sequence: Synthetic oligonucleotide
ggtcaggagtttgagaccag

SEQ ID NO: 9832 - DNA, 20 bp, Artificial Sequence
  Description of Artificial Sequence: Synthetic oligonucleotide
gtcaggagtttgagaccagc

SEQ ID NO: 9833 - DNA, 20 bp, Artificial Sequence
  Description of Artificial Sequence: Synthetic oligonucleotide
tcaggagtttgagaccagcc

SEQ ID NO: 9834 - DNA, 20 bp, Artificial Sequence
  Description of Artificial Sequence: Synthetic oligonucleotide
caggagtttgagaccagcct

SEQ ID NO: 9835 - DNA, 20 bp, Artificial Sequence
  Description of Artificial Sequence: Synthetic oligonucleotide
aggagtttgagaccagcctg

SEQ ID NO: 9836 - DNA, 20 bp, Artificial Sequence
  Description of Artificial Sequence: Synthetic oligonucleotide
ggagtttgagaccagcctgg

SEQ ID NO: 9837 - DNA, 20 bp, Artificial Sequence
  Description of Artificial Sequence: Synthetic oligonucleotide
gagtttgagaccagcctggt

SEQ ID NO: 9838 - DNA, 20 bp, Artificial Sequence
  Description of Artificial Sequence: Synthetic oligonucleotide
agtttgagaccagcctggtc

SEQ ID NO: 9839 - DNA, 20 bp, Artificial Sequence
  Description of Artificial Sequence: Synthetic oligonucleotide
gtttgagaccagcctggtca

SEQ ID NO: 9840 - DNA, 20 bp, Artificial Sequence
  Description of Artificial Sequence: Synthetic oligonucleotide
tttgagaccagcctggtcaa

SEQ ID NO: 9841 - DNA, 20 bp, Artificial Sequence
  Description of Artificial Sequence: Synthetic oligonucleotide
ttgagaccagcctggtcaac

SEQ ID NO: 9842 - DNA, 20 bp, Artificial Sequence
  Description of Artificial Sequence: Synthetic oligonucleotide
tgagaccagcctggtcaaca

SEQ ID NO: 9843 - DNA, 20 bp, Artificial Sequence
  Description of Artificial Sequence: Synthetic oligonucleotide
gagaccagcctggtcaacat

SEQ ID NO: 9844 - DNA, 20 bp, Artificial Sequence
  Description of Artificial Sequence: Synthetic oligonucleotide
agaccagcctggtcaacatg

SEQ ID NO: 9845 - DNA, 20 bp, Artificial Sequence
  Description of Artificial Sequence: Synthetic oligonucleotide
gaccagcctggtcaacatgg

SEQ ID NO: 9846 - DNA, 20 bp, Artificial Sequence
  Description of Artificial Sequence: Synthetic oligonucleotide
accagcctggtcaacatggc

SEQ ID NO: 9847 - DNA, 20 bp, Artificial Sequence
  Description of Artificial Sequence: Synthetic oligonucleotide
ccagcctggtcaacatggcc

SEQ ID NO: 9848 - DNA, 20 bp, Artificial Sequence
  Description of Artificial Sequence: Synthetic oligonucleotide
cagcctggtcaacatggcca

SEQ ID NO: 9849 - DNA, 20 bp, Artificial Sequence
  Description of Artificial Sequence: Synthetic oligonucleotide
agcctggtcaacatggccaa

SEQ ID NO: 9850 - DNA, 20 bp, Artificial Sequence
  Description of Artificial Sequence: Synthetic oligonucleotide
gcctggtcaacatggccaaa

SEQ ID NO: 9851 - DNA, 20 bp, Artificial Sequence
  Description of Artificial Sequence: Synthetic oligonucleotide
cctggtcaacatggccaaac

SEQ ID NO: 9852 - DNA, 20 bp, Artificial Sequence
  Description of Artificial Sequence: Synthetic oligonucleotide
ctggtcaacatggccaaacc

SEQ ID NO: 9853 - DNA, 20 bp, Artificial Sequence
  Description of Artificial Sequence: Synthetic oligonucleotide
tggtcaacatggccaaaccc

SEQ ID NO: 9854 - DNA, 20 bp, Artificial Sequence
  Description of Artificial Sequence: Synthetic oligonucleotide
ggtcaacatggccaaacccc

SEQ ID NO: 9855 - DNA, 20 bp, Artificial Sequence
  Description of Artificial Sequence: Synthetic oligonucleotide
gtcaacatggccaaacccca

SEQ ID NO: 9856 - DNA, 20 bp, Artificial Sequence
  Description of Artificial Sequence: Synthetic oligonucleotide
tcaacatggccaaaccccat

SEQ ID NO: 9857 - DNA, 20 bp, Artificial Sequence
  Description of Artificial Sequence: Synthetic oligonucleotide
caacatggccaaaccccatc

SEQ ID NO: 9858 - DNA, 20 bp, Artificial Sequence
  Description of Artificial Sequence: Synthetic oligonucleotide
aacatggccaaaccccatct

SEQ ID NO: 9859 - DNA, 20 bp, Artificial Sequence
  Description of Artificial Sequence: Synthetic oligonucleotide
acatggccaaaccccatctc

SEQ ID NO: 9860 - DNA, 20 bp, Artificial Sequence
  Description of Artificial Sequence: Synthetic oligonucleotide
catggccaaaccccatctct

SEQ ID NO: 9861 - DNA, 20 bp, Artificial Sequence
  Description of Artificial Sequence: Synthetic oligonucleotide
atggccaaaccccatctcta

SEQ ID NO: 9862 - DNA, 20 bp, Artificial Sequence
  Description of Artificial Sequence: Synthetic oligonucleotide
tggccaaaccccatctctag

SEQ ID NO: 9863 - DNA, 20 bp, Artificial Sequence
  Description of Artificial Sequence: Synthetic oligonucleotide
ggccaaaccccatctctagt

SEQ ID NO: 9864 - DNA, 20 bp, Artificial Sequence
  Description of Artificial Sequence: Synthetic oligonucleotide
gccaaaccccatctctagta

SEQ ID NO: 9865 - DNA, 20 bp, Artificial Sequence
  Description of Artificial Sequence: Synthetic oligonucleotide
ccaaaccccatctctagtaa

SEQ ID NO: 9866 - DNA, 20 bp, Artificial Sequence
  Description of Artificial Sequence: Synthetic oligonucleotide
caaaccccatctctagtaaa

SEQ ID NO: 9867 - DNA, 20 bp, Artificial Sequence
  Description of Artificial Sequence: Synthetic oligonucleotide
aaaccccatctctagtaaaa

SEQ ID NO: 9868 - DNA, 20 bp, Artificial Sequence
  Description of Artificial Sequence: Synthetic oligonucleotide
aaccccatctctagtaaaac

SEQ ID NO: 9869 - DNA, 20 bp, Artificial Sequence
  Description of Artificial Sequence: Synthetic oligonucleotide
accccatctctagtaaaaca

SEQ ID NO: 9870 - DNA, 20 bp, Artificial Sequence
  Description of Artificial Sequence: Synthetic oligonucleotide
ccccatctctagtaaaacat

SEQ ID NO: 9871 - DNA, 20 bp, Artificial Sequence
  Description of Artificial Sequence: Synthetic oligonucleotide
cccatctctagtaaaacata

SEQ ID NO: 9872 - DNA, 20 bp, Artificial Sequence
  Description of Artificial Sequence: Synthetic oligonucleotide
ccatctctagtaaaacatac

SEQ ID NO: 9873 - DNA, 20 bp, Artificial Sequence
  Description of Artificial Sequence: Synthetic oligonucleotide
catctctagtaaaacataca

SEQ ID NO: 9874 - DNA, 20 bp, Artificial Sequence
  Description of Artificial Sequence: Synthetic oligonucleotide
atctctagtaaaacatacaa

SEQ ID NO: 9875 - DNA, 20 bp, Artificial Sequence
  Description of Artificial Sequence: Synthetic oligonucleotide
tctctagtaaaacatacaaa

SEQ ID NO: 9876 - DNA, 20 bp, Artificial Sequence
  Description of Artificial Sequence: Synthetic oligonucleotide
ctctagtaaaacatacaaag

SEQ ID NO: 9877 - DNA, 20 bp, Artificial Sequence
  Description of Artificial Sequence: Synthetic oligonucleotide
tctagtaaaacatacaaaga

SEQ ID NO: 9878 - DNA, 20 bp, Artificial Sequence
  Description of Artificial Sequence: Synthetic oligonucleotide
ctagtaaaacatacaaagat

SEQ ID NO: 9879 - DNA, 20 bp, Artificial Sequence
  Description of Artificial Sequence: Synthetic oligonucleotide
tagtaaaacatacaaagatt

SEQ ID NO: 9880 - DNA, 20 bp, Artificial Sequence
  Description of Artificial Sequence: Synthetic oligonucleotide
agtaaaacatacaaagatta

SEQ ID NO: 9881 - DNA, 20 bp, Artificial Sequence
  Description of Artificial Sequence: Synthetic oligonucleotide
gtaaaacatacaaagattag

SEQ ID NO: 9882 - DNA, 20 bp, Artificial Sequence
  Description of Artificial Sequence: Synthetic oligonucleotide
taaaacatacaaagattagc

SEQ ID NO: 9883 - DNA, 20 bp, Artificial Sequence
  Description of Artificial Sequence: Synthetic oligonucleotide
aaaacatacaaagattagct

SEQ ID NO: 9884 - DNA, 20 bp, Artificial Sequence
  Description of Artificial Sequence: Synthetic oligonucleotide
aaacatacaaagattagctg

SEQ ID NO: 9885 - DNA, 20 bp, Artificial Sequence
  Description of Artificial Sequence: Synthetic oligonucleotide
aacatacaaagattagctgg

SEQ ID NO: 9886 - DNA, 20 bp, Artificial Sequence
  Description of Artificial Sequence: Synthetic oligonucleotide
acatacaaagattagctggg

SEQ ID NO: 9887 - DNA, 20 bp, Artificial Sequence
  Description of Artificial Sequence: Synthetic oligonucleotide
catacaaagattagctgggt

SEQ ID NO: 9888 - DNA, 20 bp, Artificial Sequence
  Description of Artificial Sequence: Synthetic oligonucleotide
atacaaagattagctgggtg

SEQ ID NO: 9889 - DNA, 20 bp, Artificial Sequence
  Description of Artificial Sequence: Synthetic oligonucleotide
tacaaagattagctgggtgt

SEQ ID NO: 9890 - DNA, 20 bp, Artificial Sequence
  Description of Artificial Sequence: Synthetic oligonucleotide
acaaagattagctgggtgtg

SEQ ID NO: 9891 - DNA, 20 bp, Artificial Sequence
  Description of Artificial Sequence: Synthetic oligonucleotide
caaagattagctgggtgtga

SEQ ID NO: 9892 - DNA, 20 bp, Artificial Sequence
  Description of Artificial Sequence: Synthetic oligonucleotide
aaagattagctgggtgtgat

SEQ ID NO: 9893 - DNA, 20 bp, Artificial Sequence
  Description of Artificial Sequence: Synthetic oligonucleotide
aagattagctgggtgtgatg

SEQ ID NO: 9894 - DNA, 20 bp, Artificial Sequence
  Description of Artificial Sequence: Synthetic oligonucleotide
agattagctgggtgtgatgg

SEQ ID NO: 9895 - DNA, 20 bp, Artificial Sequence
  Description of Artificial Sequence: Synthetic oligonucleotide
gattagctgggtgtgatggt

SEQ ID NO: 9896 - DNA, 20 bp, Artificial Sequence
  Description of Artificial Sequence: Synthetic oligonucleotide
attagctgggtgtgatggtg

SEQ ID NO: 9897 - DNA, 20 bp, Artificial Sequence
  Description of Artificial Sequence: Synthetic oligonucleotide
ttagctgggtgtgatggtgg

SEQ ID NO: 9898 - DNA, 20 bp, Artificial Sequence
  Description of Artificial Sequence: Synthetic oligonucleotide
tagctgggtgtgatggtgga

SEQ ID NO: 9899 - DNA, 20 bp, Artificial Sequence
  Description of Artificial Sequence: Synthetic oligonucleotide
agctgggtgtgatggtggac

SEQ ID NO: 9900 - DNA, 20 bp, Artificial Sequence
  Description of Artificial Sequence: Synthetic oligonucleotide
gctgggtgtgatggtggacg

SEQ ID NO: 9901 - DNA, 20 bp, Artificial Sequence
  Description of Artificial Sequence: Synthetic oligonucleotide
ctgggtgtgatggtggacgc

SEQ ID NO: 9902 - DNA, 20 bp, Artificial Sequence
  Description of Artificial Sequence: Synthetic oligonucleotide
tgggtgtgatggtggacgcc

SEQ ID NO: 9903 - DNA, 20 bp, Artificial Sequence
  Description of Artificial Sequence: Synthetic oligonucleotide
gggtgtgatggtggacgcca

SEQ ID NO: 9904 - DNA, 20 bp, Artificial Sequence
  Description of Artificial Sequence: Synthetic oligonucleotide
ggtgtgatggtggacgccag

SEQ ID NO: 9905 - DNA, 20 bp, Artificial Sequence
  Description of Artificial Sequence: Synthetic oligonucleotide
gtgtgatggtggacgccagt

SEQ ID NO: 9906 - DNA, 20 bp, Artificial Sequence
  Description of Artificial Sequence: Synthetic oligonucleotide
tgtgatggtggacgccagta

SEQ ID NO: 9907 - DNA, 20 bp, Artificial Sequence
  Description of Artificial Sequence: Synthetic oligonucleotide
gtgatggtggacgccagtaa

SEQ ID NO: 9908 - DNA, 20 bp, Artificial Sequence
  Description of Artificial Sequence: Synthetic oligonucleotide
tgatggtggacgccagtaat

SEQ ID NO: 9909 - DNA, 20 bp, Artificial Sequence
  Description of Artificial Sequence: Synthetic oligonucleotide
gatggtggacgccagtaatc

SEQ ID NO: 9910 - DNA, 20 bp, Artificial Sequence
  Description of Artificial Sequence: Synthetic oligonucleotide
atggtggacgccagtaatcc

SEQ ID NO: 9911 - DNA, 20 bp, Artificial Sequence
  Description of Artificial Sequence: Synthetic oligonucleotide
tggtggacgccagtaatccc

SEQ ID NO: 9912 - DNA, 20 bp, Artificial Sequence
  Description of Artificial Sequence: Synthetic oligonucleotide
ggtggacgccagtaatccca

SEQ ID NO: 9913 - DNA, 20 bp, Artificial Sequence
  Description of Artificial Sequence: Synthetic oligonucleotide
gtggacgccagtaatcccag

SEQ ID NO: 9914 - DNA, 20 bp, Artificial Sequence
  Description of Artificial Sequence: Synthetic oligonucleotide
tggacgccagtaatcccagc

SEQ ID NO: 9915 - DNA, 20 bp, Artificial Sequence
  Description of Artificial Sequence: Synthetic oligonucleotide
ggacgccagtaatcccagct

SEQ ID NO: 9916 - DNA, 20 bp, Artificial Sequence
  Description of Artificial Sequence: Synthetic oligonucleotide
gacgccagtaatcccagctc

SEQ ID NO: 9917 - DNA, 20 bp, Artificial Sequence
  Description of Artificial Sequence: Synthetic oligonucleotide
acgccagtaatcccagctcc

SEQ ID NO: 9918 - DNA, 20 bp, Artificial Sequence
  Description of Artificial Sequence: Synthetic oligonucleotide
cgccagtaatcccagctcct

SEQ ID NO: 9919 - DNA, 20 bp, Artificial Sequence
  Description of Artificial Sequence: Synthetic oligonucleotide
gccagtaatcccagctcctt

SEQ ID NO: 9920 - DNA, 20 bp, Artificial Sequence
  Description of Artificial Sequence: Synthetic oligonucleotide
ccagtaatcccagctcctta

SEQ ID NO: 9921 - DNA, 20 bp, Artificial Sequence
  Description of Artificial Sequence: Synthetic oligonucleotide
cagtaatcccagctccttag

SEQ ID NO: 9922 - DNA, 20 bp, Artificial Sequence
  Description of Artificial Sequence: Synthetic oligonucleotide
agtaatcccagctccttagg

SEQ ID NO: 9923 - DNA, 20 bp, Artificial Sequence
  Description of Artificial Sequence: Synthetic oligonucleotide
gtaatcccagctccttagga

SEQ ID NO: 9924 - DNA, 20 bp, Artificial Sequence
  Description of Artificial Sequence: Synthetic oligonucleotide
taatcccagctccttaggag

SEQ ID NO: 9925 - DNA, 20 bp, Artificial Sequence
  Description of Artificial Sequence: Synthetic oligonucleotide
aatcccagctccttaggagg

SEQ ID NO: 9926 - DNA, 20 bp, Artificial Sequence
  Description of Artificial Sequence: Synthetic oligonucleotide
atcccagctccttaggaggc

SEQ ID NO: 9927 - DNA, 20 bp, Artificial Sequence
  Description of Artificial Sequence: Synthetic oligonucleotide
tcccagctccttaggaggca

SEQ ID NO: 9928 - DNA, 20 bp, Artificial Sequence
  Description of Artificial Sequence: Synthetic oligonucleotide
cccagctccttaggaggcag

SEQ ID NO: 9929 - DNA, 20 bp, Artificial Sequence
  Description of Artificial Sequence: Synthetic oligonucleotide
ccagctccttaggaggcaga

SEQ ID NO: 9930 - DNA, 20 bp, Artificial Sequence
  Description of Artificial Sequence: Synthetic oligonucleotide
cagctccttaggaggcagag

SEQ ID NO: 9931 - DNA, 20 bp, Artificial Sequence
  Description of Artificial Sequence: Synthetic oligonucleotide
agctccttaggaggcagagg

SEQ ID NO: 9932 - DNA, 20 bp, Artificial Sequence
  Description of Artificial Sequence: Synthetic oligonucleotide
gctccttaggaggcagaggc

SEQ ID NO: 9933 - DNA, 20 bp, Artificial Sequence
  Description of Artificial Sequence: Synthetic oligonucleotide
ctccttaggaggcagaggca

SEQ ID NO: 9934 - DNA, 20 bp, Artificial Sequence
  Description of Artificial Sequence: Synthetic oligonucleotide
tccttaggaggcagaggcag

SEQ ID NO: 9935 - DNA, 20 bp, Artificial Sequence
  Description of Artificial Sequence: Synthetic oligonucleotide
ccttaggaggcagaggcagg

SEQ ID NO: 9936 - DNA, 20 bp, Artificial Sequence
  Description of Artificial Sequence: Synthetic oligonucleotide
cttaggaggcagaggcagga

SEQ ID NO: 9937 - DNA, 20 bp, Artificial Sequence
  Description of Artificial Sequence: Synthetic oligonucleotide
ttaggaggcagaggcaggag

SEQ ID NO: 9938 - DNA, 20 bp, Artificial Sequence
  Description of Artificial Sequence: Synthetic oligonucleotide
taggaggcagaggcaggaga

SEQ ID NO: 9939 - DNA, 20 bp, Artificial Sequence
  Description of Artificial Sequence: Synthetic oligonucleotide
aggaggcagaggcaggagaa

SEQ ID NO: 9940 - DNA, 20 bp, Artificial Sequence
  Description of Artificial Sequence: Synthetic oligonucleotide
ggaggcagaggcaggagaat

SEQ ID NO: 9941 - DNA, 20 bp, Artificial Sequence
  Description of Artificial Sequence: Synthetic oligonucleotide
gaggcagaggcaggagaatc

SEQ ID NO: 9942 - DNA, 20 bp, Artificial Sequence
  Description of Artificial Sequence: Synthetic oligonucleotide
aggcagaggcaggagaatca

SEQ ID NO: 9943 - DNA, 20 bp, Artificial Sequence
  Description of Artificial Sequence: Synthetic oligonucleotide
ggcagaggcaggagaatcac

SEQ ID NO: 9944 - DNA, 20 bp, Artificial Sequence
  Description of Artificial Sequence: Synthetic oligonucleotide
gcagaggcaggagaatcact

SEQ ID NO: 9945 - DNA, 20 bp, Artificial Sequence
  Description of Artificial Sequence: Synthetic oligonucleotide
cagaggcaggagaatcactt

SEQ ID NO: 9946 - DNA, 20 bp, Artificial Sequence
  Description of Artificial Sequence: Synthetic oligonucleotide
agaggcaggagaatcacttg

SEQ ID NO: 9947 - DNA, 20 bp, Artificial Sequence
  Description of Artificial Sequence: Synthetic oligonucleotide
gaggcaggagaatcacttga

SEQ ID NO: 9948 - DNA, 20 bp, Artificial Sequence
  Description of Artificial Sequence: Synthetic oligonucleotide
aggcaggagaatcacttgaa

SEQ ID NO: 9949 - DNA, 20 bp, Artificial Sequence
  Description of Artificial Sequence: Synthetic oligonucleotide
ggcaggagaatcacttgaac

SEQ ID NO: 9950 - DNA, 20 bp, Artificial Sequence
  Description of Artificial Sequence: Synthetic oligonucleotide
gcaggagaatcacttgaacc

SEQ ID NO: 9951 - DNA, 20 bp, Artificial Sequence
  Description of Artificial Sequence: Synthetic oligonucleotide
caggagaatcacttgaaccc

SEQ ID NO: 9952 - DNA, 20 bp, Artificial Sequence
  Description of Artificial Sequence: Synthetic oligonucleotide
aggagaatcacttgaacccg

SEQ ID NO: 9953 - DNA, 20 bp, Artificial Sequence
  Description of Artificial Sequence: Synthetic oligonucleotide
ggagaatcacttgaacccgg

SEQ ID NO: 9954 - DNA, 20 bp, Artificial Sequence
  Description of Artificial Sequence: Synthetic oligonucleotide
gagaatcacttgaacccggg

SEQ ID NO: 9955 - DNA, 20 bp, Artificial Sequence
  Description of Artificial Sequence: Synthetic oligonucleotide
agaatcacttgaacccggga

SEQ ID NO: 9956 - DNA, 20 bp, Artificial Sequence
  Description of Artificial Sequence: Synthetic oligonucleotide
gaatcacttgaacccgggag

SEQ ID NO: 9957 - DNA, 20 bp, Artificial Sequence
  Description of Artificial Sequence: Synthetic oligonucleotide
aatcacttgaacccgggagg

SEQ ID NO: 9958 - DNA, 20 bp, Artificial Sequence
  Description of Artificial Sequence: Synthetic oligonucleotide
atcacttgaacccgggaggc

SEQ ID NO: 9959 - DNA, 20 bp, Artificial Sequence
  Description of Artificial Sequence: Synthetic oligonucleotide
tcacttgaacccgggaggca

SEQ ID NO: 9960 - DNA, 20 bp, Artificial Sequence
  Description of Artificial Sequence: Synthetic oligonucleotide
cacttgaacccgggaggcag

SEQ ID NO: 9961 - DNA, 20 bp, Artificial Sequence
  Description of Artificial Sequence: Synthetic oligonucleotide
acttgaacccgggaggcaga

SEQ ID NO: 9962 - DNA, 20 bp, Artificial Sequence
  Description of Artificial Sequence: Synthetic oligonucleotide
cttgaacccgggaggcagag

SEQ ID NO: 9963 - DNA, 20 bp, Artificial Sequence
  Description of Artificial Sequence: Synthetic oligonucleotide
ttgaacccgggaggcagagg

SEQ ID NO: 9964 - DNA, 20 bp, Artificial Sequence
  Description of Artificial Sequence: Synthetic oligonucleotide
tgaacccgggaggcagaggt

SEQ ID NO: 9965 - DNA, 20 bp, Artificial Sequence
  Description of Artificial Sequence: Synthetic oligonucleotide
gaacccgggaggcagaggtt

SEQ ID NO: 9966 - DNA, 20 bp, Artificial Sequence
  Description of Artificial Sequence: Synthetic oligonucleotide
aacccgggaggcagaggttg

SEQ ID NO: 9967 - DNA, 20 bp, Artificial Sequence
  Description of Artificial Sequence: Synthetic oligonucleotide
acccgggaggcagaggttgc

SEQ ID NO: 9968 - DNA, 20 bp, Artificial Sequence
  Description of Artificial Sequence: Synthetic oligonucleotide
cccgggaggcagaggttgca

SEQ ID NO: 9969 - DNA, 20 bp, Artificial Sequence
  Description of Artificial Sequence: Synthetic oligonucleotide
ccgggaggcagaggttgcag

SEQ ID NO: 9970 - DNA, 20 bp, Artificial Sequence
  Description of Artificial Sequence: Synthetic oligonucleotide
cgggaggcagaggttgcagt

SEQ ID NO: 9971 - DNA, 20 bp, Artificial Sequence
  Description of Artificial Sequence: Synthetic oligonucleotide
gggaggcagaggttgcagtc

SEQ ID NO: 9972 - DNA, 20 bp, Artificial Sequence
  Description of Artificial Sequence: Synthetic oligonucleotide
ggaggcagaggttgcagtca

SEQ ID NO: 9973 - DNA, 20 bp, Artificial Sequence
  Description of Artificial Sequence: Synthetic oligonucleotide
gaggcagaggttgcagtcag

SEQ ID NO: 9974 - DNA, 20 bp, Artificial Sequence
  Description of Artificial Sequence: Synthetic oligonucleotide
aggcagaggttgcagtcagc

SEQ ID NO: 9975 - DNA, 20 bp, Artificial Sequence
  Description of Artificial Sequence: Synthetic oligonucleotide
ggcagaggttgcagtcagct

SEQ ID NO: 9976 - DNA, 20 bp, Artificial Sequence
  Description of Artificial Sequence: Synthetic oligonucleotide
gcagaggttgcagtcagctg

SEQ ID NO: 9977 - DNA, 20 bp, Artificial Sequence
  Description of Artificial Sequence: Synthetic oligonucleotide
cagaggttgcagtcagctga

SEQ ID NO: 9978 - DNA, 20 bp, Artificial Sequence
  Description of Artificial Sequence: Synthetic oligonucleotide
agaggttgcagtcagctgag

SEQ ID NO: 9979 - DNA, 20 bp, Artificial Sequence
  Description of Artificial Sequence: Synthetic oligonucleotide
gaggttgcagtcagctgagg

SEQ ID NO: 9980 - DNA, 20 bp, Artificial Sequence
  Description of Artificial Sequence: Synthetic oligonucleotide
aggttgcagtcagctgaggt

SEQ ID NO: 9981 - DNA, 20 bp, Artificial Sequence
  Description of Artificial Sequence: Synthetic oligonucleotide
ggttgcagtcagctgaggtt

SEQ ID NO: 9982 - DNA, 20 bp, Artificial Sequence
  Description of Artificial Sequence: Synthetic oligonucleotide
gttgcagtcagctgaggttg

SEQ ID NO: 9983 - DNA, 20 bp, Artificial Sequence
  Description of Artificial Sequence: Synthetic oligonucleotide
ttgcagtcagctgaggttga

SEQ ID NO: 9984 - DNA, 20 bp, Artificial Sequence
  Description of Artificial Sequence: Synthetic oligonucleotide
tgcagtcagctgaggttgaa

SEQ ID NO: 9985 - DNA, 20 bp, Artificial Sequence
  Description of Artificial Sequence: Synthetic oligonucleotide
gcagtcagctgaggttgaac

SEQ ID NO: 9986 - DNA, 20 bp, Artificial Sequence
  Description of Artificial Sequence: Synthetic oligonucleotide
cagtcagctgaggttgaacc

SEQ ID NO: 9987 - DNA, 20 bp, Artificial Sequence
  Description of Artificial Sequence: Synthetic oligonucleotide
agtcagctgaggttgaacca

SEQ ID NO: 9988 - DNA, 20 bp, Artificial Sequence
  Description of Artificial Sequence: Synthetic oligonucleotide
gtcagctgaggttgaaccat

SEQ ID NO: 9989 - DNA, 20 bp, Artificial Sequence
  Description of Artificial Sequence: Synthetic oligonucleotide
tcagctgaggttgaaccatt

SEQ ID NO: 9990 - DNA, 20 bp, Artificial Sequence
  Description of Artificial Sequence: Synthetic oligonucleotide
cagctgaggttgaaccattg

SEQ ID NO: 9991 - DNA, 20 bp, Artificial Sequence
  Description of Artificial Sequence: Synthetic oligonucleotide
agctgaggttgaaccattgc

SEQ ID NO: 9992 - DNA, 20 bp, Artificial Sequence
  Description of Artificial Sequence: Synthetic oligonucleotide
gctgaggttgaaccattgca

SEQ ID NO: 9993 - DNA, 20 bp, Artificial Sequence
  Description of Artificial Sequence: Synthetic oligonucleotide
ctgaggttgaaccattgcac

SEQ ID NO: 9994 - DNA, 20 bp, Artificial Sequence
  Description of Artificial Sequence: Synthetic oligonucleotide
tgaggttgaaccattgcact

SEQ ID NO: 9995 - DNA, 20 bp, Artificial Sequence
  Description of Artificial Sequence: Synthetic oligonucleotide
gaggttgaaccattgcactc

SEQ ID NO: 9996 - DNA, 20 bp, Artificial Sequence
  Description of Artificial Sequence: Synthetic oligonucleotide
aggttgaaccattgcactcc

SEQ ID NO: 9997 - DNA, 20 bp, Artificial Sequence
  Description of Artificial Sequence: Synthetic oligonucleotide
ggttgaaccattgcactcca

SEQ ID NO: 9998 - DNA, 20 bp, Artificial Sequence
  Description of Artificial Sequence: Synthetic oligonucleotide
gttgaaccattgcactccaa

SEQ ID NO: 9999 - DNA, 20 bp, Artificial Sequence
  Description of Artificial Sequence: Synthetic oligonucleotide
ttgaaccattgcactccaac

SEQ ID NO: 10000 - DNA, 20 bp, Artificial Sequence
  Description of Artificial Sequence: Synthetic oligonucleotide
tgaaccattgcactccaacc

SEQ ID NO: 10001 - DNA, 20 bp, Artificial Sequence
  Description of Artificial Sequence: Synthetic oligonucleotide
gaaccattgcactccaacct

SEQ ID NO: 10002 - DNA, 20 bp, Artificial Sequence
  Description of Artificial Sequence: Synthetic oligonucleotide
aaccattgcactccaacctg

SEQ ID NO: 10003 - DNA, 20 bp, Artificial Sequence
  Description of Artificial Sequence: Synthetic oligonucleotide
accattgcactccaacctgg

SEQ ID NO: 10004 - DNA, 20 bp, Artificial Sequence
  Description of Artificial Sequence: Synthetic oligonucleotide
ccattgcactccaacctggg

SEQ ID NO: 10005 - DNA, 20 bp, Artificial Sequence
  Description of Artificial Sequence: Synthetic oligonucleotide
cattgcactccaacctgggt

SEQ ID NO: 10006 - DNA, 20 bp, Artificial Sequence
  Description of Artificial Sequence: Synthetic oligonucleotide
attgcactccaacctgggtg

SEQ ID NO: 10007 - DNA, 20 bp, Artificial Sequence
  Description of Artificial Sequence: Synthetic oligonucleotide
ttgcactccaacctgggtga

SEQ ID NO: 10008 - DNA, 20 bp, Artificial Sequence
  Description of Artificial Sequence: Synthetic oligonucleotide
tgcactccaacctgggtgac

SEQ ID NO: 10009 - DNA, 20 bp, Artificial Sequence
  Description of Artificial Sequence: Synthetic oligonucleotide
gcactccaacctgggtgaca

SEQ ID NO: 10010 - DNA, 20 bp, Artificial Sequence
  Description of Artificial Sequence: Synthetic oligonucleotide
cactccaacctgggtgacag

SEQ ID NO: 10011 - DNA, 20 bp, Artificial Sequence
  Description of Artificial Sequence: Synthetic oligonucleotide
actccaacctgggtgacaga

SEQ ID NO: 10012 - DNA, 20 bp, Artificial Sequence
  Description of Artificial Sequence: Synthetic oligonucleotide
ctccaacctgggtgacagag

SEQ ID NO: 10013 - DNA, 20 bp, Artificial Sequence
  Description of Artificial Sequence: Synthetic oligonucleotide
tccaacctgggtgacagagt

SEQ ID NO: 10014 - DNA, 20 bp, Artificial Sequence
  Description of Artificial Sequence: Synthetic oligonucleotide
ccaacctgggtgacagagtg

SEQ ID NO: 10015 - DNA, 20 bp, Artificial Sequence
  Description of Artificial Sequence: Synthetic oligonucleotide
caacctgggtgacagagtga

SEQ ID NO: 10016 - DNA, 20 bp, Artificial Sequence
  Description of Artificial Sequence: Synthetic oligonucleotide
aacctgggtgacagagtgag

SEQ ID NO: 10017 - DNA, 20 bp, Artificial Sequence
  Description of Artificial Sequence: Synthetic oligonucleotide
acctgggtgacagagtgaga

SEQ ID NO: 10018 - DNA, 20 bp, Artificial Sequence
  Description of Artificial Sequence: Synthetic oligonucleotide
cctgggtgacagagtgagac

SEQ ID NO: 10019 - DNA, 20 bp, Artificial Sequence
  Description of Artificial Sequence: Synthetic oligonucleotide
ctgggtgacagagtgagact

SEQ ID NO: 10020 - DNA, 20 bp, Artificial Sequence
  Description of Artificial Sequence: Synthetic oligonucleotide
tgggtgacagagtgagactc

SEQ ID NO: 10021 - DNA, 20 bp, Artificial Sequence
  Description of Artificial Sequence: Synthetic oligonucleotide
gggtgacagagtgagactct

SEQ ID NO: 10022 - DNA, 20 bp, Artificial Sequence
  Description of Artificial Sequence: Synthetic oligonucleotide
ggtgacagagtgagactctg

SEQ ID NO: 10023 - DNA, 20 bp, Artificial Sequence
  Description of Artificial Sequence: Synthetic oligonucleotide
gtgacagagtgagactctgt

SEQ ID NO: 10024 - DNA, 20 bp, Artificial Sequence
  Description of Artificial Sequence: Synthetic oligonucleotide
tgacagagtgagactctgtc

SEQ ID NO: 10025 - DNA, 20 bp, Artificial Sequence
  Description of Artificial Sequence: Synthetic oligonucleotide
gacagagtgagactctgtct

SEQ ID NO: 10026 - DNA, 20 bp, Artificial Sequence
  Description of Artificial Sequence: Synthetic oligonucleotide
acagagtgagactctgtctc

SEQ ID NO: 10027 - DNA, 20 bp, Artificial Sequence
  Description of Artificial Sequence: Synthetic oligonucleotide
cagagtgagactctgtctca

SEQ ID NO: 10028 - DNA, 20 bp, Artificial Sequence
  Description of Artificial Sequence: Synthetic oligonucleotide
agagtgagactctgtctcaa

SEQ ID NO: 10029 - DNA, 20 bp, Artificial Sequence
  Description of Artificial Sequence: Synthetic oligonucleotide
gagtgagactctgtctcaaa

SEQ ID NO: 10030 - DNA, 20 bp, Artificial Sequence
  Description of Artificial Sequence: Synthetic oligonucleotide
agtgagactctgtctcaaaa

SEQ ID NO: 10031 - DNA, 20 bp, Artificial Sequence
  Description of Artificial Sequence: Synthetic oligonucleotide
gtgagactctgtctcaaaaa

SEQ ID NO: 10032 - DNA, 20 bp, Artificial Sequence
  Description of Artificial Sequence: Synthetic oligonucleotide
tgagactctgtctcaaaaaa

SEQ ID NO: 10033 - DNA, 20 bp, Artificial Sequence
  Description of Artificial Sequence: Synthetic oligonucleotide
gagactctgtctcaaaaaaa

SEQ ID NO: 10034 - DNA, 20 bp, Artificial Sequence
  Description of Artificial Sequence: Synthetic oligonucleotide
agactctgtctcaaaaaaaa

SEQ ID NO: 10035 - DNA, 20 bp, Artificial Sequence
  Description of Artificial Sequence: Synthetic oligonucleotide
gactctgtctcaaaaaaaaa

SEQ ID NO: 10036 - DNA, 20 bp, Artificial Sequence
  Description of Artificial Sequence: Synthetic oligonucleotide
actctgtctcaaaaaaaaaa

SEQ ID NO: 10037 - DNA, 20 bp, Artificial Sequence
  Description of Artificial Sequence: Synthetic oligonucleotide
ctctgtctcaaaaaaaaaaa

SEQ ID NO: 10038 - DNA, 20 bp, Artificial Sequence
  Description of Artificial Sequence: Synthetic oligonucleotide
tctgtctcaaaaaaaaaaaa

SEQ ID NO: 10039 - DNA, 20 bp, Artificial Sequence
  Description of Artificial Sequence: Synthetic oligonucleotide
ctgtctcaaaaaaaaaaaag

SEQ ID NO: 10040 - DNA, 20 bp, Artificial Sequence
  Description of Artificial Sequence: Synthetic oligonucleotide
tgtctcaaaaaaaaaaaaga

SEQ ID NO: 10041 - DNA, 20 bp, Artificial Sequence
  Description of Artificial Sequence: Synthetic oligonucleotide
gtctcaaaaaaaaaaaagac

SEQ ID NO: 10042 - DNA, 20 bp, Artificial Sequence
  Description of Artificial Sequence: Synthetic oligonucleotide
tctcaaaaaaaaaaaagact

SEQ ID NO: 10043 - DNA, 20 bp, Artificial Sequence
  Description of Artificial Sequence: Synthetic oligonucleotide
ctcaaaaaaaaaaaagactt

SEQ ID NO: 10044 - DNA, 20 bp, Artificial Sequence
  Description of Artificial Sequence: Synthetic oligonucleotide
tcaaaaaaaaaaaagacttg

SEQ ID NO: 10045 - DNA, 20 bp, Artificial Sequence
  Description of Artificial Sequence: Synthetic oligonucleotide
caaaaaaaaaaaagacttga

SEQ ID NO: 10046 - DNA, 20 bp, Artificial Sequence
  Description of Artificial Sequence: Synthetic oligonucleotide
aaaaaaaaaaaagacttgat

SEQ ID NO: 10047 - DNA, 20 bp, Artificial Sequence
  Description of Artificial Sequence: Synthetic oligonucleotide
aaaaaaaaaaagacttgata

SEQ ID NO: 10048 - DNA, 20 bp, Artificial Sequence
  Description of Artificial Sequence: Synthetic oligonucleotide
aaaaaaaaaagacttgataa

SEQ ID NO: 10049 - DNA, 20 bp, Artificial Sequence
  Description of Artificial Sequence: Synthetic oligonucleotide
aaaaaaaaagacttgataaa

SEQ ID NO: 10050 - DNA, 20 bp, Artificial Sequence
  Description of Artificial Sequence: Synthetic oligonucleotide
aaaaaaaagacttgataaat

SEQ ID NO: 10051 - DNA, 20 bp, Artificial Sequence
  Description of Artificial Sequence: Synthetic oligonucleotide
aaaaaaagacttgataaatg

SEQ ID NO: 10052 - DNA, 20 bp, Artificial Sequence
  Description of Artificial Sequence: Synthetic oligonucleotide
aaaaaagacttgataaatga

SEQ ID NO: 10053 - DNA, 20 bp, Artificial Sequence
  Description of Artificial Sequence: Synthetic oligonucleotide
aaaaagacttgataaatgaa

SEQ ID NO: 10054 - DNA, 20 bp, Artificial Sequence
  Description of Artificial Sequence: Synthetic oligonucleotide
aaaagacttgataaatgaat

SEQ ID NO: 10055 - DNA, 20 bp, Artificial Sequence
  Description of Artificial Sequence: Synthetic oligonucleotide
aaagacttgataaatgaata

SEQ ID NO: 10056 - DNA, 20 bp, Artificial Sequence
  Description of Artificial Sequence: Synthetic oligonucleotide
aagacttgataaatgaataa

SEQ ID NO: 10057 - DNA, 20 bp, Artificial Sequence
  Description of Artificial Sequence: Synthetic oligonucleotide
agacttgataaatgaataaa

SEQ ID NO: 10058 - DNA, 20 bp, Artificial Sequence
  Description of Artificial Sequence: Synthetic oligonucleotide
gacttgataaatgaataaaa

SEQ ID NO: 10059 - DNA, 20 bp, Artificial Sequence
  Description of Artificial Sequence: Synthetic oligonucleotide
acttgataaatgaataaaaa

SEQ ID NO: 10060 - DNA, 20 bp, Artificial Sequence
  Description of Artificial Sequence: Synthetic oligonucleotide
cttgataaatgaataaaaat

SEQ ID NO: 10061 - DNA, 20 bp, Artificial Sequence
  Description of Artificial Sequence: Synthetic oligonucleotide
ttgataaatgaataaaaatt

SEQ ID NO: 10062 - DNA, 20 bp, Artificial Sequence
  Description of Artificial Sequence: Synthetic oligonucleotide
tgataaatgaataaaaatta

SEQ ID NO: 10063 - DNA, 20 bp, Artificial Sequence
  Description of Artificial Sequence: Synthetic oligonucleotide
gataaatgaataaaaattag

SEQ ID NO: 10064 - DNA, 20 bp, Artificial Sequence
  Description of Artificial Sequence: Synthetic oligonucleotide
ataaatgaataaaaattagc

SEQ ID NO: 10065 - DNA, 20 bp, Artificial Sequence
  Description of Artificial Sequence: Synthetic oligonucleotide
taaatgaataaaaattagct

SEQ ID NO: 10066 - DNA, 20 bp, Artificial Sequence
  Description of Artificial Sequence: Synthetic oligonucleotide
aaatgaataaaaattagctg

SEQ ID NO: 10067 - DNA, 20 bp, Artificial Sequence
  Description of Artificial Sequence: Synthetic oligonucleotide
aatgaataaaaattagctgg

SEQ ID NO: 10068 - DNA, 20 bp, Artificial Sequence
  Description of Artificial Sequence: Synthetic oligonucleotide
atgaataaaaattagctggg

SEQ ID NO: 10069 - DNA, 20 bp, Artificial Sequence
  Description of Artificial Sequence: Synthetic oligonucleotide
tgaataaaaattagctgggc

SEQ ID NO: 10070 - DNA, 20 bp, Artificial Sequence
  Description of Artificial Sequence: Synthetic oligonucleotide
gaataaaaattagctgggcg

SEQ ID NO: 10071 - DNA, 20 bp, Artificial Sequence
  Description of Artificial Sequence: Synthetic oligonucleotide
aataaaaattagctgggcgt

SEQ ID NO: 10072 - DNA, 20 bp, Artificial Sequence
  Description of Artificial Sequence: Synthetic oligonucleotide
ataaaaattagctgggcgtg

SEQ ID NO: 10073 - DNA, 20 bp, Artificial Sequence
  Description of Artificial Sequence: Synthetic oligonucleotide
taaaaattagctgggcgtgg

SEQ ID NO: 10074 - DNA, 20 bp, Artificial Sequence
  Description of Artificial Sequence: Synthetic oligonucleotide
aaaaattagctgggcgtggt

SEQ ID NO: 10075 - DNA, 20 bp, Artificial Sequence
  Description of Artificial Sequence: Synthetic oligonucleotide
aaaattagctgggcgtggtg

SEQ ID NO: 10076 - DNA, 20 bp, Artificial Sequence
  Description of Artificial Sequence: Synthetic oligonucleotide
aaattagctgggcgtggtgg

SEQ ID NO: 10077 - DNA, 20 bp, Artificial Sequence
  Description of Artificial Sequence: Synthetic oligonucleotide
aattagctgggcgtggtggc

SEQ ID NO: 10078 - DNA, 20 bp, Artificial Sequence
  Description of Artificial Sequence: Synthetic oligonucleotide
attagctgggcgtggtggcg

SEQ ID NO: 10079 - DNA, 20 bp, Artificial Sequence
  Description of Artificial Sequence: Synthetic oligonucleotide
ttagctgggcgtggtggcgg

SEQ ID NO: 10080 - DNA, 20 bp, Artificial Sequence
  Description of Artificial Sequence: Synthetic oligonucleotide
tagctgggcgtggtggcggt

SEQ ID NO: 10081 - DNA, 20 bp, Artificial Sequence
  Description of Artificial Sequence: Synthetic oligonucleotide
agctgggcgtggtggcggta

SEQ ID NO: 10082 - DNA, 20 bp, Artificial Sequence
  Description of Artificial Sequence: Synthetic oligonucleotide
gctgggcgtggtggcggtag

SEQ ID NO: 10083 - DNA, 20 bp, Artificial Sequence
  Description of Artificial Sequence: Synthetic oligonucleotide
ctgggcgtggtggcggtagg

SEQ ID NO: 10084 - DNA, 20 bp, Artificial Sequence
  Description of Artificial Sequence: Synthetic oligonucleotide
tgggcgtggtggcggtaggc

SEQ ID NO: 10085 - DNA, 20 bp, Artificial Sequence
  Description of Artificial Sequence: Synthetic oligonucleotide
gggcgtggtggcggtaggcg

SEQ ID NO: 10086 - DNA, 20 bp, Artificial Sequence
  Description of Artificial Sequence: Synthetic oligonucleotide
ggcgtggtggcggtaggcgc

SEQ ID NO: 10087 - DNA, 20 bp, Artificial Sequence
  Description of Artificial Sequence: Synthetic oligonucleotide
gcgtggtggcggtaggcgcc

SEQ ID NO: 10088 - DNA, 20 bp, Artificial Sequence
  Description of Artificial Sequence: Synthetic oligonucleotide
cgtggtggcggtaggcgcct

SEQ ID NO: 10089 - DNA, 20 bp, Artificial Sequence
  Description of Artificial Sequence: Synthetic oligonucleotide
gtggtggcggtaggcgccta

SEQ ID NO: 10090 - DNA, 20 bp, Artificial Sequence
  Description of Artificial Sequence: Synthetic oligonucleotide
tggtggcggtaggcgcctat

SEQ ID NO: 10091 - DNA, 20 bp, Artificial Sequence
  Description of Artificial Sequence: Synthetic oligonucleotide
ggtggcggtaggcgcctata

SEQ ID NO: 10092 - DNA, 20 bp, Artificial Sequence
  Description of Artificial Sequence: Synthetic oligonucleotide
gtggcggtaggcgcctataa

SEQ ID NO: 10093 - DNA, 20 bp, Artificial Sequence
  Description of Artificial Sequence: Synthetic oligonucleotide
tggcggtaggcgcctataat

SEQ ID NO: 10094 - DNA, 20 bp, Artificial Sequence
  Description of Artificial Sequence: Synthetic oligonucleotide
ggcggtaggcgcctataatc

SEQ ID NO: 10095 - DNA, 20 bp, Artificial Sequence
  Description of Artificial Sequence: Synthetic oligonucleotide
gcggtaggcgcctataatcc

SEQ ID NO: 10096 - DNA, 20 bp, Artificial Sequence
  Description of Artificial Sequence: Synthetic oligonucleotide
cggtaggcgcctataatccc

SEQ ID NO: 10097 - DNA, 20 bp, Artificial Sequence
  Description of Artificial Sequence: Synthetic oligonucleotide
ggtaggcgcctataatccca

SEQ ID NO: 10098 - DNA, 20 bp, Artificial Sequence
  Description of Artificial Sequence: Synthetic oligonucleotide
gtaggcgcctataatcccat

SEQ ID NO: 10099 - DNA, 20 bp, Artificial Sequence
  Description of Artificial Sequence: Synthetic oligonucleotide
taggcgcctataatcccatc

SEQ ID NO: 10100 - DNA, 20 bp, Artificial Sequence
  Description of Artificial Sequence: Synthetic oligonucleotide
aggcgcctataatcccatct

SEQ ID NO: 10101 - DNA, 20 bp, Artificial Sequence
  Description of Artificial Sequence: Synthetic oligonucleotide
ggcgcctataatcccatcta

SEQ ID NO: 10102 - DNA, 20 bp, Artificial Sequence
  Description of Artificial Sequence: Synthetic oligonucleotide
gcgcctataatcccatctac

SEQ ID NO: 10103 - DNA, 20 bp, Artificial Sequence
  Description of Artificial Sequence: Synthetic oligonucleotide
cgcctataatcccatctact

SEQ ID NO: 10104 - DNA, 20 bp, Artificial Sequence
  Description of Artificial Sequence: Synthetic oligonucleotide
gcctataatcccatctactt

SEQ ID NO: 10105 - DNA, 20 bp, Artificial Sequence
  Description of Artificial Sequence: Synthetic oligonucleotide
cctataatcccatctacttg

SEQ ID NO: 10106 - DNA, 20 bp, Artificial Sequence
  Description of Artificial Sequence: Synthetic oligonucleotide
ctataatcccatctacttga

SEQ ID NO: 10107 - DNA, 20 bp, Artificial Sequence
  Description of Artificial Sequence: Synthetic oligonucleotide
tataatcccatctacttgag

SEQ ID NO: 10108 - DNA, 20 bp, Artificial Sequence
  Description of Artificial Sequence: Synthetic oligonucleotide
ataatcccatctacttgaga

SEQ ID NO: 10109 - DNA, 20 bp, Artificial Sequence
  Description of Artificial Sequence: Synthetic oligonucleotide
taatcccatctacttgagag

SEQ ID NO: 10110 - DNA, 20 bp, Artificial Sequence
  Description of Artificial Sequence: Synthetic oligonucleotide
aatcccatctacttgagagg

SEQ ID NO: 10111 - DNA, 20 bp, Artificial Sequence
  Description of Artificial Sequence: Synthetic oligonucleotide
atcccatctacttgagaggc

SEQ ID NO: 10112 - DNA, 20 bp, Artificial Sequence
  Description of Artificial Sequence: Synthetic oligonucleotide
tcccatctacttgagaggct

SEQ ID NO: 10113 - DNA, 20 bp, Artificial Sequence
  Description of Artificial Sequence: Synthetic oligonucleotide
cccatctacttgagaggctg

SEQ ID NO: 10114 - DNA, 20 bp, Artificial Sequence
  Description of Artificial Sequence: Synthetic oligonucleotide
ccatctacttgagaggctga

SEQ ID NO: 10115 - DNA, 20 bp, Artificial Sequence
  Description of Artificial Sequence: Synthetic oligonucleotide
catctacttgagaggctgag

SEQ ID NO: 10116 - DNA, 20 bp, Artificial Sequence
  Description of Artificial Sequence: Synthetic oligonucleotide
atctacttgagaggctgagg

SEQ ID NO: 10117 - DNA, 20 bp, Artificial Sequence
  Description of Artificial Sequence: Synthetic oligonucleotide
tctacttgagaggctgaggc

SEQ ID NO: 10118 - DNA, 20 bp, Artificial Sequence
  Description of Artificial Sequence: Synthetic oligonucleotide
ctacttgagaggctgaggca

SEQ ID NO: 10119 - DNA, 20 bp, Artificial Sequence
  Description of Artificial Sequence: Synthetic oligonucleotide
tacttgagaggctgaggcag

SEQ ID NO: 10120 - DNA, 20 bp, Artificial Sequence
  Description of Artificial Sequence: Synthetic oligonucleotide
acttgagaggctgaggcagg

SEQ ID NO: 10121 - DNA, 20 bp, Artificial Sequence
  Description of Artificial Sequence: Synthetic oligonucleotide
cttgagaggctgaggcagga

SEQ ID NO: 10122 - DNA, 20 bp, Artificial Sequence
  Description of Artificial Sequence: Synthetic oligonucleotide
ttgagaggctgaggcaggag

SEQ ID NO: 10123 - DNA, 20 bp, Artificial Sequence
  Description of Artificial Sequence: Synthetic oligonucleotide
tgagaggctgaggcaggaga

SEQ ID NO: 10124 - DNA, 20 bp, Artificial Sequence
  Description of Artificial Sequence: Synthetic oligonucleotide
gagaggctgaggcaggagaa

SEQ ID NO: 10125 - DNA, 20 bp, Artificial Sequence
  Description of Artificial Sequence: Synthetic oligonucleotide
agaggctgaggcaggagaat

SEQ ID NO: 10126 - DNA, 20 bp, Artificial Sequence
  Description of Artificial Sequence: Synthetic oligonucleotide
gaggctgaggcaggagaatc

SEQ ID NO: 10127 - DNA, 20 bp, Artificial Sequence
  Description of Artificial Sequence: Synthetic oligonucleotide
aggctgaggcaggagaatca

SEQ ID NO: 10128 - DNA, 20 bp, Artificial Sequence
  Description of Artificial Sequence: Synthetic oligonucleotide
ggctgaggcaggagaatcac

SEQ ID NO: 10129 - DNA, 20 bp, Artificial Sequence
  Description of Artificial Sequence: Synthetic oligonucleotide
gctgaggcaggagaatcact

SEQ ID NO: 10130 - DNA, 20 bp, Artificial Sequence
  Description of Artificial Sequence: Synthetic oligonucleotide
ctgaggcaggagaatcactt

SEQ ID NO: 10131 - DNA, 20 bp, Artificial Sequence
  Description of Artificial Sequence: Synthetic oligonucleotide
tgaggcaggagaatcacttg

SEQ ID NO: 10132 - DNA, 20 bp, Artificial Sequence
  Description of Artificial Sequence: Synthetic oligonucleotide
gaggcaggagaatcacttga

SEQ ID NO: 10133 - DNA, 20 bp, Artificial Sequence
  Description of Artificial Sequence: Synthetic oligonucleotide
aggcaggagaatcacttgaa

SEQ ID NO: 10134 - DNA, 20 bp, Artificial Sequence
  Description of Artificial Sequence: Synthetic oligonucleotide
ggcaggagaatcacttgaac

SEQ ID NO: 10135 - DNA, 20 bp, Artificial Sequence
  Description of Artificial Sequence: Synthetic oligonucleotide
gcaggagaatcacttgaacc

SEQ ID NO: 10136 - DNA, 20 bp, Artificial Sequence
  Description of Artificial Sequence: Synthetic oligonucleotide
caggagaatcacttgaaccc

SEQ ID NO: 10137 - DNA, 20 bp, Artificial Sequence
  Description of Artificial Sequence: Synthetic oligonucleotide
aggagaatcacttgaaccca

SEQ ID NO: 10138 - DNA, 20 bp, Artificial Sequence
  Description of Artificial Sequence: Synthetic oligonucleotide
ggagaatcacttgaacccag

SEQ ID NO: 10139 - DNA, 20 bp, Artificial Sequence
  Description of Artificial Sequence: Synthetic oligonucleotide
gagaatcacttgaacccagt

SEQ ID NO: 10140 - DNA, 20 bp, Artificial Sequence
  Description of Artificial Sequence: Synthetic oligonucleotide
agaatcacttgaacccagtg

SEQ ID NO: 10141 - DNA, 20 bp, Artificial Sequence
  Description of Artificial Sequence: Synthetic oligonucleotide
gaatcacttgaacccagtgg

SEQ ID NO: 10142 - DNA, 20 bp, Artificial Sequence
  Description of Artificial Sequence: Synthetic oligonucleotide
aatcacttgaacccagtggg

SEQ ID NO: 10143 - DNA, 20 bp, Artificial Sequence
  Description of Artificial Sequence: Synthetic oligonucleotide
atcacttgaacccagtggga

SEQ ID NO: 10144 - DNA, 20 bp, Artificial Sequence
  Description of Artificial Sequence: Synthetic oligonucleotide
tcacttgaacccagtgggag

SEQ ID NO: 10145 - DNA, 20 bp, Artificial Sequence
  Description of Artificial Sequence: Synthetic oligonucleotide
cacttgaacccagtgggagg

SEQ ID NO: 10146 - DNA, 20 bp, Artificial Sequence
  Description of Artificial Sequence: Synthetic oligonucleotide
acttgaacccagtgggaggc

SEQ ID NO: 10147 - DNA, 20 bp, Artificial Sequence
  Description of Artificial Sequence: Synthetic oligonucleotide
cttgaacccagtgggaggca

SEQ ID NO: 10148 - DNA, 20 bp, Artificial Sequence
  Description of Artificial Sequence: Synthetic oligonucleotide
ttgaacccagtgggaggcag

SEQ ID NO: 10149 - DNA, 20 bp, Artificial Sequence
  Description of Artificial Sequence: Synthetic oligonucleotide
tgaacccagtgggaggcaga

SEQ ID NO: 10150 - DNA, 20 bp, Artificial Sequence
  Description of Artificial Sequence: Synthetic oligonucleotide
gaacccagtgggaggcagag

SEQ ID NO: 10151 - DNA, 20 bp, Artificial Sequence
  Description of Artificial Sequence: Synthetic oligonucleotide
aacccagtgggaggcagagg

SEQ ID NO: 10152 - DNA, 20 bp, Artificial Sequence
  Description of Artificial Sequence: Synthetic oligonucleotide
acccagtgggaggcagaggt

SEQ ID NO: 10153 - DNA, 20 bp, Artificial Sequence
  Description of Artificial Sequence: Synthetic oligonucleotide
cccagtgggaggcagaggtt

SEQ ID NO: 10154 - DNA, 20 bp, Artificial Sequence
  Description of Artificial Sequence: Synthetic oligonucleotide
ccagtgggaggcagaggttg

SEQ ID NO: 10155 - DNA, 20 bp, Artificial Sequence
  Description of Artificial Sequence: Synthetic oligonucleotide
cagtgggaggcagaggttgc

SEQ ID NO: 10156 - DNA, 20 bp, Artificial Sequence
  Description of Artificial Sequence: Synthetic oligonucleotide
agtgggaggcagaggttgca

SEQ ID NO: 10157 - DNA, 20 bp, Artificial Sequence
  Description of Artificial Sequence: Synthetic oligonucleotide
gtgggaggcagaggttgcag

SEQ ID NO: 10158 - DNA, 20 bp, Artificial Sequence
  Description of Artificial Sequence: Synthetic oligonucleotide
tgggaggcagaggttgcagt

SEQ ID NO: 10159 - DNA, 20 bp, Artificial Sequence
  Description of Artificial Sequence: Synthetic oligonucleotide
gggaggcagaggttgcagtg

SEQ ID NO: 10160 - DNA, 20 bp, Artificial Sequence
  Description of Artificial Sequence: Synthetic oligonucleotide
ggaggcagaggttgcagtga

SEQ ID NO: 10161 - DNA, 20 bp, Artificial Sequence
  Description of Artificial Sequence: Synthetic oligonucleotide
gaggcagaggttgcagtgag

SEQ ID NO: 10162 - DNA, 20 bp, Artificial Sequence
  Description of Artificial Sequence: Synthetic oligonucleotide
aggcagaggttgcagtgagc

SEQ ID NO: 10163 - DNA, 20 bp, Artificial Sequence
  Description of Artificial Sequence: Synthetic oligonucleotide
ggcagaggttgcagtgagct

SEQ ID NO: 10164 - DNA, 20 bp, Artificial Sequence
  Description of Artificial Sequence: Synthetic oligonucleotide
gcagaggttgcagtgagctg

SEQ ID NO: 10165 - DNA, 20 bp, Artificial Sequence
  Description of Artificial Sequence: Synthetic oligonucleotide
cagaggttgcagtgagctga

SEQ ID NO: 10166 - DNA, 20 bp, Artificial Sequence
  Description of Artificial Sequence: Synthetic oligonucleotide
agaggttgcagtgagctgag

SEQ ID NO: 10167 - DNA, 20 bp, Artificial Sequence
  Description of Artificial Sequence: Synthetic oligonucleotide
gaggttgcagtgagctgaga

SEQ ID NO: 10168 - DNA, 20 bp, Artificial Sequence
  Description of Artificial Sequence: Synthetic oligonucleotide
aggttgcagtgagctgagat

SEQ ID NO: 10169 - DNA, 20 bp, Artificial Sequence
  Description of Artificial Sequence: Synthetic oligonucleotide
ggttgcagtgagctgagatt

SEQ ID NO: 10170 - DNA, 20 bp, Artificial Sequence
  Description of Artificial Sequence: Synthetic oligonucleotide
gttgcagtgagctgagattg

SEQ ID NO: 10171 - DNA, 20 bp, Artificial Sequence
  Description of Artificial Sequence: Synthetic oligonucleotide
ttgcagtgagctgagattgc

SEQ ID NO: 10172 - DNA, 20 bp, Artificial Sequence
  Description of Artificial Sequence: Synthetic oligonucleotide
tgcagtgagctgagattgcg

SEQ ID NO: 10173 - DNA, 20 bp, Artificial Sequence
  Description of Artificial Sequence: Synthetic oligonucleotide
gcagtgagctgagattgcgc

SEQ ID NO: 10174 - DNA, 20 bp, Artificial Sequence
  Description of Artificial Sequence: Synthetic oligonucleotide
cagtgagctgagattgcgcc

SEQ ID NO: 10175 - DNA, 20 bp, Artificial Sequence
  Description of Artificial Sequence: Synthetic oligonucleotide
agtgagctgagattgcgcca

SEQ ID NO: 10176 - DNA, 20 bp, Artificial Sequence
  Description of Artificial Sequence: Synthetic oligonucleotide
gtgagctgagattgcgccac

SEQ ID NO: 10177 - DNA, 20 bp, Artificial Sequence
  Description of Artificial Sequence: Synthetic oligonucleotide
tgagctgagattgcgccact

SEQ ID NO: 10178 - DNA, 20 bp, Artificial Sequence
  Description of Artificial Sequence: Synthetic oligonucleotide
gagctgagattgcgccactg

SEQ ID NO: 10179 - DNA, 20 bp, Artificial Sequence
  Description of Artificial Sequence: Synthetic oligonucleotide
agctgagattgcgccactgc

SEQ ID NO: 10180 - DNA, 20 bp, Artificial Sequence
  Description of Artificial Sequence: Synthetic oligonucleotide
gctgagattgcgccactgca

SEQ ID NO: 10181 - DNA, 20 bp, Artificial Sequence
  Description of Artificial Sequence: Synthetic oligonucleotide
ctgagattgcgccactgcac

SEQ ID NO: 10182 - DNA, 20 bp, Artificial Sequence
  Description of Artificial Sequence: Synthetic oligonucleotide
tgagattgcgccactgcact

SEQ ID NO: 10183 - DNA, 20 bp, Artificial Sequence
  Description of Artificial Sequence: Synthetic oligonucleotide
gagattgcgccactgcactc

SEQ ID NO: 10184 - DNA, 20 bp, Artificial Sequence
  Description of Artificial Sequence: Synthetic oligonucleotide
agattgcgccactgcactcc

SEQ ID NO: 10185 - DNA, 20 bp, Artificial Sequence
  Description of Artificial Sequence: Synthetic oligonucleotide
gattgcgccactgcactcca

SEQ ID NO: 10186 - DNA, 20 bp, Artificial Sequence
  Description of Artificial Sequence: Synthetic oligonucleotide
attgcgccactgcactccag

SEQ ID NO: 10187 - DNA, 20 bp, Artificial Sequence
  Description of Artificial Sequence: Synthetic oligonucleotide
ttgcgccactgcactccagc

SEQ ID NO: 10188 - DNA, 20 bp, Artificial Sequence
  Description of Artificial Sequence: Synthetic oligonucleotide
tgcgccactgcactccagcc

SEQ ID NO: 10189 - DNA, 20 bp, Artificial Sequence
  Description of Artificial Sequence: Synthetic oligonucleotide
gcgccactgcactccagcct

SEQ ID NO: 10190 - DNA, 20 bp, Artificial Sequence
  Description of Artificial Sequence: Synthetic oligonucleotide
cgccactgcactccagcctg

SEQ ID NO: 10191 - DNA, 20 bp, Artificial Sequence
  Description of Artificial Sequence: Synthetic oligonucleotide
gccactgcactccagcctgg

SEQ ID NO: 10192 - DNA, 20 bp, Artificial Sequence
  Description of Artificial Sequence: Synthetic oligonucleotide
ccactgcactccagcctgga

SEQ ID NO: 10193 - DNA, 20 bp, Artificial Sequence
  Description of Artificial Sequence: Synthetic oligonucleotide
cactgcactccagcctggac

SEQ ID NO: 10194 - DNA, 20 bp, Artificial Sequence
  Description of Artificial Sequence: Synthetic oligonucleotide
actgcactccagcctggaca

SEQ ID NO: 10195 - DNA, 20 bp, Artificial Sequence
  Description of Artificial Sequence: Synthetic oligonucleotide
ctgcactccagcctggacaa

SEQ ID NO: 10196 - DNA, 20 bp, Artificial Sequence
  Description of Artificial Sequence: Synthetic oligonucleotide
tgcactccagcctggacaac

SEQ ID NO: 10197 - DNA, 20 bp, Artificial Sequence
  Description of Artificial Sequence: Synthetic oligonucleotide
gcactccagcctggacaaca

SEQ ID NO: 10198 - DNA, 20 bp, Artificial Sequence
  Description of Artificial Sequence: Synthetic oligonucleotide
cactccagcctggacaacag

SEQ ID NO: 10199 - DNA, 20 bp, Artificial Sequence
  Description of Artificial Sequence: Synthetic oligonucleotide
actccagcctggacaacaga

SEQ ID NO: 10200 - DNA, 20 bp, Artificial Sequence
  Description of Artificial Sequence: Synthetic oligonucleotide
ctccagcctggacaacagag

SEQ ID NO: 10201 - DNA, 20 bp, Artificial Sequence
  Description of Artificial Sequence: Synthetic oligonucleotide
tccagcctggacaacagagc

SEQ ID NO: 10202 - DNA, 20 bp, Artificial Sequence
  Description of Artificial Sequence: Synthetic oligonucleotide
ccagcctggacaacagagcg

SEQ ID NO: 10203 - DNA, 20 bp, Artificial Sequence
  Description of Artificial Sequence: Synthetic oligonucleotide
cagcctggacaacagagcga

SEQ ID NO: 10204 - DNA, 20 bp, Artificial Sequence
  Description of Artificial Sequence: Synthetic oligonucleotide
agcctggacaacagagcgag

SEQ ID NO: 10205 - DNA, 20 bp, Artificial Sequence
  Description of Artificial Sequence: Synthetic oligonucleotide
gcctggacaacagagcgaga

SEQ ID NO: 10206 - DNA, 20 bp, Artificial Sequence
  Description of Artificial Sequence: Synthetic oligonucleotide
cctggacaacagagcgagac

SEQ ID NO: 10207 - DNA, 20 bp, Artificial Sequence
  Description of Artificial Sequence: Synthetic oligonucleotide
ctggacaacagagcgagact

SEQ ID NO: 10208 - DNA, 20 bp, Artificial Sequence
  Description of Artificial Sequence: Synthetic oligonucleotide
tggacaacagagcgagactc

SEQ ID NO: 10209 - DNA, 20 bp, Artificial Sequence
  Description of Artificial Sequence: Synthetic oligonucleotide
ggacaacagagcgagactcc

SEQ ID NO: 10210 - DNA, 20 bp, Artificial Sequence
  Description of Artificial Sequence: Synthetic oligonucleotide
gacaacagagcgagactccg

SEQ ID NO: 10211 - DNA, 20 bp, Artificial Sequence
  Description of Artificial Sequence: Synthetic oligonucleotide
acaacagagcgagactccgt

SEQ ID NO: 10212 - DNA, 20 bp, Artificial Sequence
  Description of Artificial Sequence: Synthetic oligonucleotide
caacagagcgagactccgtc

SEQ ID NO: 10213 - DNA, 20 bp, Artificial Sequence
  Description of Artificial Sequence: Synthetic oligonucleotide
aacagagcgagactccgtct

SEQ ID NO: 10214 - DNA, 20 bp, Artificial Sequence
  Description of Artificial Sequence: Synthetic oligonucleotide
acagagcgagactccgtctc

SEQ ID NO: 10215 - DNA, 20 bp, Artificial Sequence
  Description of Artificial Sequence: Synthetic oligonucleotide
cagagcgagactccgtctca

SEQ ID NO: 10216 - DNA, 20 bp, Artificial Sequence
  Description of Artificial Sequence: Synthetic oligonucleotide
agagcgagactccgtctcaa

SEQ ID NO: 10217 - DNA, 20 bp, Artificial Sequence
  Description of Artificial Sequence: Synthetic oligonucleotide
gagcgagactccgtctcaaa

SEQ ID NO: 10218 - DNA, 20 bp, Artificial Sequence
  Description of Artificial Sequence: Synthetic oligonucleotide
agcgagactccgtctcaaaa

SEQ ID NO: 10219 - DNA, 20 bp, Artificial Sequence
  Description of Artificial Sequence: Synthetic oligonucleotide
gcgagactccgtctcaaaaa

SEQ ID NO: 10220 - DNA, 20 bp, Artificial Sequence
  Description of Artificial Sequence: Synthetic oligonucleotide
cgagactccgtctcaaaaag

SEQ ID NO: 10221 - DNA, 20 bp, Artificial Sequence
  Description of Artificial Sequence: Synthetic oligonucleotide
gagactccgtctcaaaaagc

SEQ ID NO: 10222 - DNA, 20 bp, Artificial Sequence
  Description of Artificial Sequence: Synthetic oligonucleotide
agactccgtctcaaaaagca

SEQ ID NO: 10223 - DNA, 20 bp, Artificial Sequence
  Description of Artificial Sequence: Synthetic oligonucleotide
gactccgtctcaaaaagcaa

SEQ ID NO: 10224 - DNA, 20 bp, Artificial Sequence
  Description of Artificial Sequence: Synthetic oligonucleotide
actccgtctcaaaaagcaaa

SEQ ID NO: 10225 - DNA, 20 bp, Artificial Sequence
  Description of Artificial Sequence: Synthetic oligonucleotide
ctccgtctcaaaaagcaaac

SEQ ID NO: 10226 - DNA, 20 bp, Artificial Sequence
  Description of Artificial Sequence: Synthetic oligonucleotide
tccgtctcaaaaagcaaaca

SEQ ID NO: 10227 - DNA, 20 bp, Artificial Sequence
  Description of Artificial Sequence: Synthetic oligonucleotide
ccgtctcaaaaagcaaacaa

SEQ ID NO: 10228 - DNA, 20 bp, Artificial Sequence
  Description of Artificial Sequence: Synthetic oligonucleotide
cgtctcaaaaagcaaacaaa

SEQ ID NO: 10229 - DNA, 20 bp, Artificial Sequence
  Description of Artificial Sequence: Synthetic oligonucleotide
gtctcaaaaagcaaacaaaa

SEQ ID NO: 10230 - DNA, 20 bp, Artificial Sequence
  Description of Artificial Sequence: Synthetic oligonucleotide
tctcaaaaagcaaacaaaac

SEQ ID NO: 10231 - DNA, 20 bp, Artificial Sequence
  Description of Artificial Sequence: Synthetic oligonucleotide
ctcaaaaagcaaacaaaaca

SEQ ID NO: 10232 - DNA, 20 bp, Artificial Sequence
  Description of Artificial Sequence: Synthetic oligonucleotide
tcaaaaagcaaacaaaacag

SEQ ID NO: 10233 - DNA, 20 bp, Artificial Sequence
  Description of Artificial Sequence: Synthetic oligonucleotide
caaaaagcaaacaaaacagt

SEQ ID NO: 10234 - DNA, 20 bp, Artificial Sequence
  Description of Artificial Sequence: Synthetic oligonucleotide
aaaaagcaaacaaaacagtc

SEQ ID NO: 10235 - DNA, 20 bp, Artificial Sequence
  Description of Artificial Sequence: Synthetic oligonucleotide
aaaagcaaacaaaacagtct

SEQ ID NO: 10236 - DNA, 20 bp, Artificial Sequence
  Description of Artificial Sequence: Synthetic oligonucleotide
aaagcaaacaaaacagtctt

SEQ ID NO: 10237 - DNA, 20 bp, Artificial Sequence
  Description of Artificial Sequence: Synthetic oligonucleotide
aagcaaacaaaacagtcttg

SEQ ID NO: 10238 - DNA, 20 bp, Artificial Sequence
  Description of Artificial Sequence: Synthetic oligonucleotide
agcaaacaaaacagtcttga

SEQ ID NO: 10239 - DNA, 20 bp, Artificial Sequence
  Description of Artificial Sequence: Synthetic oligonucleotide
gcaaacaaaacagtcttgac

SEQ ID NO: 10240 - DNA, 20 bp, Artificial Sequence
  Description of Artificial Sequence: Synthetic oligonucleotide
caaacaaaacagtcttgaca

SEQ ID NO: 10241 - DNA, 20 bp, Artificial Sequence
  Description of Artificial Sequence: Synthetic oligonucleotide
aaacaaaacagtcttgacaa

SEQ ID NO: 10242 - DNA, 20 bp, Artificial Sequence
  Description of Artificial Sequence: Synthetic oligonucleotide
aacaaaacagtcttgacaaa

SEQ ID NO: 10243 - DNA, 20 bp, Artificial Sequence
  Description of Artificial Sequence: Synthetic oligonucleotide
acaaaacagtcttgacaaat

SEQ ID NO: 10244 - DNA, 20 bp, Artificial Sequence
  Description of Artificial Sequence: Synthetic oligonucleotide
caaaacagtcttgacaaatg

SEQ ID NO: 10245 - DNA, 20 bp, Artificial Sequence
  Description of Artificial Sequence: Synthetic oligonucleotide
aaaacagtcttgacaaatga

SEQ ID NO: 10246 - DNA, 20 bp, Artificial Sequence
  Description of Artificial Sequence: Synthetic oligonucleotide
aaacagtcttgacaaatgaa

SEQ ID NO: 10247 - DNA, 20 bp, Artificial Sequence
  Description of Artificial Sequence: Synthetic oligonucleotide
aacagtcttgacaaatgaat

SEQ ID NO: 10248 - DNA, 20 bp, Artificial Sequence
  Description of Artificial Sequence: Synthetic oligonucleotide
acagtcttgacaaatgaatg

SEQ ID NO: 10249 - DNA, 20 bp, Artificial Sequence
  Description of Artificial Sequence: Synthetic oligonucleotide
cagtcttgacaaatgaatga

SEQ ID NO: 10250 - DNA, 20 bp, Artificial Sequence
  Description of Artificial Sequence: Synthetic oligonucleotide
agtcttgacaaatgaatgaa

SEQ ID NO: 10251 - DNA, 20 bp, Artificial Sequence
  Description of Artificial Sequence: Synthetic oligonucleotide
gtcttgacaaatgaatgaat

SEQ ID NO: 10252 - DNA, 20 bp, Artificial Sequence
  Description of Artificial Sequence: Synthetic oligonucleotide
tcttgacaaatgaatgaatg

SEQ ID NO: 10253 - DNA, 20 bp, Artificial Sequence
  Description of Artificial Sequence: Synthetic oligonucleotide
cttgacaaatgaatgaatga

SEQ ID NO: 10254 - DNA, 20 bp, Artificial Sequence
  Description of Artificial Sequence: Synthetic oligonucleotide
ttgacaaatgaatgaatgaa

SEQ ID NO: 10255 - DNA, 20 bp, Artificial Sequence
  Description of Artificial Sequence: Synthetic oligonucleotide
tgacaaatgaatgaatgaat

SEQ ID NO: 10256 - DNA, 20 bp, Artificial Sequence
  Description of Artificial Sequence: Synthetic oligonucleotide
gacaaatgaatgaatgaatg

SEQ ID NO: 10257 - DNA, 20 bp, Artificial Sequence
  Description of Artificial Sequence: Synthetic oligonucleotide
acaaatgaatgaatgaatga

SEQ ID NO: 10258 - DNA, 20 bp, Artificial Sequence
  Description of Artificial Sequence: Synthetic oligonucleotide
caaatgaatgaatgaatgaa

SEQ ID NO: 10259 - DNA, 20 bp, Artificial Sequence
  Description of Artificial Sequence: Synthetic oligonucleotide
aaatgaatgaatgaatgaat

SEQ ID NO: 10260 - DNA, 20 bp, Artificial Sequence
  Description of Artificial Sequence: Synthetic oligonucleotide
aatgaatgaatgaatgaatg

SEQ ID NO: 10261 - DNA, 20 bp, Artificial Sequence
  Description of Artificial Sequence: Synthetic oligonucleotide
atgaatgaatgaatgaatga

SEQ ID NO: 10262 - DNA, 20 bp, Artificial Sequence
  Description of Artificial Sequence: Synthetic oligonucleotide
tgaatgaatgaatgaatgaa

SEQ ID NO: 10263 - DNA, 20 bp, Artificial Sequence
  Description of Artificial Sequence: Synthetic oligonucleotide
gaatgaatgaatgaatgaat

SEQ ID NO: 10264 - DNA, 20 bp, Artificial Sequence
  Description of Artificial Sequence: Synthetic oligonucleotide
aatgaatgaatgaatgaatg

SEQ ID NO: 10265 - DNA, 20 bp, Artificial Sequence
  Description of Artificial Sequence: Synthetic oligonucleotide
atgaatgaatgaatgaatga

SEQ ID NO: 10266 - DNA, 20 bp, Artificial Sequence
  Description of Artificial Sequence: Synthetic oligonucleotide
tgaatgaatgaatgaatgag

SEQ ID NO: 10267 - DNA, 20 bp, Artificial Sequence
  Description of Artificial Sequence: Synthetic oligonucleotide
gaatgaatgaatgaatgagg

SEQ ID NO: 10268 - DNA, 20 bp, Artificial Sequence
  Description of Artificial Sequence: Synthetic oligonucleotide
aatgaatgaatgaatgaggc

SEQ ID NO: 10269 - DNA, 20 bp, Artificial Sequence
  Description of Artificial Sequence: Synthetic oligonucleotide
atgaatgaatgaatgaggca

SEQ ID NO: 10270 - DNA, 20 bp, Artificial Sequence
  Description of Artificial Sequence: Synthetic oligonucleotide
tgaatgaatgaatgaggcag

SEQ ID NO: 10271 - DNA, 20 bp, Artificial Sequence
  Description of Artificial Sequence: Synthetic oligonucleotide
gaatgaatgaatgaggcagc

SEQ ID NO: 10272 - DNA, 20 bp, Artificial Sequence
  Description of Artificial Sequence: Synthetic oligonucleotide
aatgaatgaatgaggcagca

SEQ ID NO: 10273 - DNA, 20 bp, Artificial Sequence
  Description of Artificial Sequence: Synthetic oligonucleotide
atgaatgaatgaggcagcag

SEQ ID NO: 10274 - DNA, 20 bp, Artificial Sequence
  Description of Artificial Sequence: Synthetic oligonucleotide
tgaatgaatgaggcagcagg

SEQ ID NO: 10275 - DNA, 20 bp, Artificial Sequence
  Description of Artificial Sequence: Synthetic oligonucleotide
gaatgaatgaggcagcaggt

SEQ ID NO: 10276 - DNA, 20 bp, Artificial Sequence
  Description of Artificial Sequence: Synthetic oligonucleotide
aatgaatgaggcagcaggtc

SEQ ID NO: 10277 - DNA, 20 bp, Artificial Sequence
  Description of Artificial Sequence: Synthetic oligonucleotide
atgaatgaggcagcaggtcc

SEQ ID NO: 10278 - DNA, 20 bp, Artificial Sequence
  Description of Artificial Sequence: Synthetic oligonucleotide
tgaatgaggcagcaggtcca

SEQ ID NO: 10279 - DNA, 20 bp, Artificial Sequence
  Description of Artificial Sequence: Synthetic oligonucleotide
gaatgaggcagcaggtccag

SEQ ID NO: 10280 - DNA, 20 bp, Artificial Sequence
  Description of Artificial Sequence: Synthetic oligonucleotide
aatgaggcagcaggtccaga

SEQ ID NO: 10281 - DNA, 20 bp, Artificial Sequence
  Description of Artificial Sequence: Synthetic oligonucleotide
atgaggcagcaggtccagaa

SEQ ID NO: 10282 - DNA, 20 bp, Artificial Sequence
  Description of Artificial Sequence: Synthetic oligonucleotide
tgaggcagcaggtccagaac

SEQ ID NO: 10283 - DNA, 20 bp, Artificial Sequence
  Description of Artificial Sequence: Synthetic oligonucleotide
gaggcagcaggtccagaacg

SEQ ID NO: 10284 - DNA, 20 bp, Artificial Sequence
  Description of Artificial Sequence: Synthetic oligonucleotide
aggcagcaggtccagaacgg

SEQ ID NO: 10285 - DNA, 20 bp, Artificial Sequence
  Description of Artificial Sequence: Synthetic oligonucleotide
ggcagcaggtccagaacggg

SEQ ID NO: 10286 - DNA, 20 bp, Artificial Sequence
  Description of Artificial Sequence: Synthetic oligonucleotide
gcagcaggtccagaacggga

SEQ ID NO: 10287 - DNA, 20 bp, Artificial Sequence
  Description of Artificial Sequence: Synthetic oligonucleotide
cagcaggtccagaacgggaa

SEQ ID NO: 10288 - DNA, 20 bp, Artificial Sequence
  Description of Artificial Sequence: Synthetic oligonucleotide
agcaggtccagaacgggaag

SEQ ID NO: 10289 - DNA, 20 bp, Artificial Sequence
  Description of Artificial Sequence: Synthetic oligonucleotide
gcaggtccagaacgggaaga

SEQ ID NO: 10290 - DNA, 20 bp, Artificial Sequence
  Description of Artificial Sequence: Synthetic oligonucleotide
caggtccagaacgggaagaa

SEQ ID NO: 10291 - DNA, 20 bp, Artificial Sequence
  Description of Artificial Sequence: Synthetic oligonucleotide
aggtccagaacgggaagaac

SEQ ID NO: 10292 - DNA, 20 bp, Artificial Sequence
  Description of Artificial Sequence: Synthetic oligonucleotide
ggtccagaacgggaagaact

SEQ ID NO: 10293 - DNA, 20 bp, Artificial Sequence
  Description of Artificial Sequence: Synthetic oligonucleotide
gtccagaacgggaagaactg

SEQ ID NO: 10294 - DNA, 20 bp, Artificial Sequence
  Description of Artificial Sequence: Synthetic oligonucleotide
tccagaacgggaagaactgt

SEQ ID NO: 10295 - DNA, 20 bp, Artificial Sequence
  Description of Artificial Sequence: Synthetic oligonucleotide
ccagaacgggaagaactgtg

SEQ ID NO: 10296 - DNA, 20 bp, Artificial Sequence
  Description of Artificial Sequence: Synthetic oligonucleotide
cagaacgggaagaactgtgc

SEQ ID NO: 10297 - DNA, 20 bp, Artificial Sequence
  Description of Artificial Sequence: Synthetic oligonucleotide
agaacgggaagaactgtgct

SEQ ID NO: 10298 - DNA, 20 bp, Artificial Sequence
  Description of Artificial Sequence: Synthetic oligonucleotide
gaacgggaagaactgtgctg

SEQ ID NO: 10299 - DNA, 20 bp, Artificial Sequence
  Description of Artificial Sequence: Synthetic oligonucleotide
aacgggaagaactgtgctga

SEQ ID NO: 10300 - DNA, 20 bp, Artificial Sequence
  Description of Artificial Sequence: Synthetic oligonucleotide
acgggaagaactgtgctgag

SEQ ID NO: 10301 - DNA, 20 bp, Artificial Sequence
  Description of Artificial Sequence: Synthetic oligonucleotide
cgggaagaactgtgctgagc

SEQ ID NO: 10302 - DNA, 20 bp, Artificial Sequence
  Description of Artificial Sequence: Synthetic oligonucleotide
gggaagaactgtgctgagca

SEQ ID NO: 10303 - DNA, 20 bp, Artificial Sequence
  Description of Artificial Sequence: Synthetic oligonucleotide
ggaagaactgtgctgagcag

SEQ ID NO: 10304 - DNA, 20 bp, Artificial Sequence
  Description of Artificial Sequence: Synthetic oligonucleotide
gaagaactgtgctgagcagg

SEQ ID NO: 10305 - DNA, 20 bp, Artificial Sequence
  Description of Artificial Sequence: Synthetic oligonucleotide
aagaactgtgctgagcagga

SEQ ID NO: 10306 - DNA, 20 bp, Artificial Sequence
  Description of Artificial Sequence: Synthetic oligonucleotide
agaactgtgctgagcaggag

SEQ ID NO: 10307 - DNA, 20 bp, Artificial Sequence
  Description of Artificial Sequence: Synthetic oligonucleotide
gaactgtgctgagcaggagc

SEQ ID NO: 10308 - DNA, 20 bp, Artificial Sequence
  Description of Artificial Sequence: Synthetic oligonucleotide
aactgtgctgagcaggagca

SEQ ID NO: 10309 - DNA, 20 bp, Artificial Sequence
  Description of Artificial Sequence: Synthetic oligonucleotide
actgtgctgagcaggagcat

SEQ ID NO: 10310 - DNA, 20 bp, Artificial Sequence
  Description of Artificial Sequence: Synthetic oligonucleotide
ctgtgctgagcaggagcatc

SEQ ID NO: 10311 - DNA, 20 bp, Artificial Sequence
  Description of Artificial Sequence: Synthetic oligonucleotide
tgtgctgagcaggagcatct

SEQ ID NO: 10312 - DNA, 20 bp, Artificial Sequence
  Description of Artificial Sequence: Synthetic oligonucleotide
gtgctgagcaggagcatctc

SEQ ID NO: 10313 - DNA, 20 bp, Artificial Sequence
  Description of Artificial Sequence: Synthetic oligonucleotide
tgctgagcaggagcatctca

SEQ ID NO: 10314 - DNA, 20 bp, Artificial Sequence
  Description of Artificial Sequence: Synthetic oligonucleotide
gctgagcaggagcatctcag

SEQ ID NO: 10315 - DNA, 20 bp, Artificial Sequence
  Description of Artificial Sequence: Synthetic oligonucleotide
ctgagcaggagcatctcaga

SEQ ID NO: 10316 - DNA, 20 bp, Artificial Sequence
  Description of Artificial Sequence: Synthetic oligonucleotide
tgagcaggagcatctcagag

SEQ ID NO: 10317 - DNA, 20 bp, Artificial Sequence
  Description of Artificial Sequence: Synthetic oligonucleotide
gagcaggagcatctcagagg

SEQ ID NO: 10318 - DNA, 20 bp, Artificial Sequence
  Description of Artificial Sequence: Synthetic oligonucleotide
agcaggagcatctcagaggc

SEQ ID NO: 10319 - DNA, 20 bp, Artificial Sequence
  Description of Artificial Sequence: Synthetic oligonucleotide
gcaggagcatctcagaggct

SEQ ID NO: 10320 - DNA, 20 bp, Artificial Sequence
  Description of Artificial Sequence: Synthetic oligonucleotide
caggagcatctcagaggctc

SEQ ID NO: 10321 - DNA, 20 bp, Artificial Sequence
  Description of Artificial Sequence: Synthetic oligonucleotide
aggagcatctcagaggctct

SEQ ID NO: 10322 - DNA, 20 bp, Artificial Sequence
  Description of Artificial Sequence: Synthetic oligonucleotide
ggagcatctcagaggctctg

SEQ ID NO: 10323 - DNA, 20 bp, Artificial Sequence
  Description of Artificial Sequence: Synthetic oligonucleotide
gagcatctcagaggctctgc

SEQ ID NO: 10324 - DNA, 20 bp, Artificial Sequence
  Description of Artificial Sequence: Synthetic oligonucleotide
agcatctcagaggctctgcc

SEQ ID NO: 10325 - DNA, 20 bp, Artificial Sequence
  Description of Artificial Sequence: Synthetic oligonucleotide
gcatctcagaggctctgcct

SEQ ID NO: 10326 - DNA, 20 bp, Artificial Sequence
  Description of Artificial Sequence: Synthetic oligonucleotide
catctcagaggctctgcctg

SEQ ID NO: 10327 - DNA, 20 bp, Artificial Sequence
  Description of Artificial Sequence: Synthetic oligonucleotide
atctcagaggctctgcctgg

SEQ ID NO: 10328 - DNA, 20 bp, Artificial Sequence
  Description of Artificial Sequence: Synthetic oligonucleotide
tctcagaggctctgcctggg

SEQ ID NO: 10329 - DNA, 20 bp, Artificial Sequence
  Description of Artificial Sequence: Synthetic oligonucleotide
ctcagaggctctgcctgggg

SEQ ID NO: 10330 - DNA, 20 bp, Artificial Sequence
  Description of Artificial Sequence: Synthetic oligonucleotide
tcagaggctctgcctggggt

SEQ ID NO: 10331 - DNA, 20 bp, Artificial Sequence
  Description of Artificial Sequence: Synthetic oligonucleotide
cagaggctctgcctggggtc

SEQ ID NO: 10332 - DNA, 20 bp, Artificial Sequence
  Description of Artificial Sequence: Synthetic oligonucleotide
agaggctctgcctggggtcc

SEQ ID NO: 10333 - DNA, 20 bp, Artificial Sequence
  Description of Artificial Sequence: Synthetic oligonucleotide
gaggctctgcctggggtccc

SEQ ID NO: 10334 - DNA, 20 bp, Artificial Sequence
  Description of Artificial Sequence: Synthetic oligonucleotide
aggctctgcctggggtccca

SEQ ID NO: 10335 - DNA, 20 bp, Artificial Sequence
  Description of Artificial Sequence: Synthetic oligonucleotide
ggctctgcctggggtcccag

SEQ ID NO: 10336 - DNA, 20 bp, Artificial Sequence
  Description of Artificial Sequence: Synthetic oligonucleotide
gctctgcctggggtcccagc

SEQ ID NO: 10337 - DNA, 20 bp, Artificial Sequence
  Description of Artificial Sequence: Synthetic oligonucleotide
ctctgcctggggtcccagct

SEQ ID NO: 10338 - DNA, 20 bp, Artificial Sequence
  Description of Artificial Sequence: Synthetic oligonucleotide
tctgcctggggtcccagctc

SEQ ID NO: 10339 - DNA, 20 bp, Artificial Sequence
  Description of Artificial Sequence: Synthetic oligonucleotide
ctgcctggggtcccagctcc

SEQ ID NO: 10340 - DNA, 20 bp, Artificial Sequence
  Description of Artificial Sequence: Synthetic oligonucleotide
tgcctggggtcccagctcct

SEQ ID NO: 10341 - DNA, 20 bp, Artificial Sequence
  Description of Artificial Sequence: Synthetic oligonucleotide
gcctggggtcccagctccta

SEQ ID NO: 10342 - DNA, 20 bp, Artificial Sequence
  Description of Artificial Sequence: Synthetic oligonucleotide
cctggggtcccagctcctag

SEQ ID NO: 10343 - DNA, 20 bp, Artificial Sequence
  Description of Artificial Sequence: Synthetic oligonucleotide
ctggggtcccagctcctaga

SEQ ID NO: 10344 - DNA, 20 bp, Artificial Sequence
  Description of Artificial Sequence: Synthetic oligonucleotide
tggggtcccagctcctagag

SEQ ID NO: 10345 - DNA, 20 bp, Artificial Sequence
  Description of Artificial Sequence: Synthetic oligonucleotide
ggggtcccagctcctagagg

SEQ ID NO: 10346 - DNA, 20 bp, Artificial Sequence
  Description of Artificial Sequence: Synthetic oligonucleotide
gggtcccagctcctagaggg

SEQ ID NO: 10347 - DNA, 20 bp, Artificial Sequence
  Description of Artificial Sequence: Synthetic oligonucleotide
ggtcccagctcctagaggga

SEQ ID NO: 10348 - DNA, 20 bp, Artificial Sequence
  Description of Artificial Sequence: Synthetic oligonucleotide
gtcccagctcctagagggag

SEQ ID NO: 10349 - DNA, 20 bp, Artificial Sequence
  Description of Artificial Sequence: Synthetic oligonucleotide
tcccagctcctagagggaga

SEQ ID NO: 10350 - DNA, 20 bp, Artificial Sequence
  Description of Artificial Sequence: Synthetic oligonucleotide
cccagctcctagagggagag

SEQ ID NO: 10351 - DNA, 20 bp, Artificial Sequence
  Description of Artificial Sequence: Synthetic oligonucleotide
ccagctcctagagggagagg

SEQ ID NO: 10352 - DNA, 20 bp, Artificial Sequence
  Description of Artificial Sequence: Synthetic oligonucleotide
cagctcctagagggagagga

SEQ ID NO: 10353 - DNA, 20 bp, Artificial Sequence
  Description of Artificial Sequence: Synthetic oligonucleotide
agctcctagagggagaggag

SEQ ID NO: 10354 - DNA, 20 bp, Artificial Sequence
  Description of Artificial Sequence: Synthetic oligonucleotide
gctcctagagggagaggagg

SEQ ID NO: 10355 - DNA, 20 bp, Artificial Sequence
  Description of Artificial Sequence: Synthetic oligonucleotide
ctcctagagggagaggaggc

SEQ ID NO: 10356 - DNA, 20 bp, Artificial Sequence
  Description of Artificial Sequence: Synthetic oligonucleotide
tcctagagggagaggaggca

SEQ ID NO: 10357 - DNA, 20 bp, Artificial Sequence
  Description of Artificial Sequence: Synthetic oligonucleotide
cctagagggagaggaggcag

SEQ ID NO: 10358 - DNA, 20 bp, Artificial Sequence
  Description of Artificial Sequence: Synthetic oligonucleotide
ctagagggagaggaggcagg

SEQ ID NO: 10359 - DNA, 20 bp, Artificial Sequence
  Description of Artificial Sequence: Synthetic oligonucleotide
tagagggagaggaggcaggg

SEQ ID NO: 10360 - DNA, 20 bp, Artificial Sequence
  Description of Artificial Sequence: Synthetic oligonucleotide
agagggagaggaggcagggt

SEQ ID NO: 10361 - DNA, 20 bp, Artificial Sequence
  Description of Artificial Sequence: Synthetic oligonucleotide
gagggagaggaggcagggtt

SEQ ID NO: 10362 - DNA, 20 bp, Artificial Sequence
  Description of Artificial Sequence: Synthetic oligonucleotide
agggagaggaggcagggttg

SEQ ID NO: 10363 - DNA, 20 bp, Artificial Sequence
  Description of Artificial Sequence: Synthetic oligonucleotide
gggagaggaggcagggttga

SEQ ID NO: 10364 - DNA, 20 bp, Artificial Sequence
  Description of Artificial Sequence: Synthetic oligonucleotide
ggagaggaggcagggttgag

SEQ ID NO: 10365 - DNA, 20 bp, Artificial Sequence
  Description of Artificial Sequence: Synthetic oligonucleotide
gagaggaggcagggttgagg

SEQ ID NO: 10366 - DNA, 20 bp, Artificial Sequence
  Description of Artificial Sequence: Synthetic oligonucleotide
agaggaggcagggttgagga

SEQ ID NO: 10367 - DNA, 20 bp, Artificial Sequence
  Description of Artificial Sequence: Synthetic oligonucleotide
gaggaggcagggttgaggaa

SEQ ID NO: 10368 - DNA, 20 bp, Artificial Sequence
  Description of Artificial Sequence: Synthetic oligonucleotide
aggaggcagggttgaggaaa

SEQ ID NO: 10369 - DNA, 20 bp, Artificial Sequence
  Description of Artificial Sequence: Synthetic oligonucleotide
ggaggcagggttgaggaaag

SEQ ID NO: 10370 - DNA, 20 bp, Artificial Sequence
  Description of Artificial Sequence: Synthetic oligonucleotide
gaggcagggttgaggaaaga

SEQ ID NO: 10371 - DNA, 20 bp, Artificial Sequence
  Description of Artificial Sequence: Synthetic oligonucleotide
aggcagggttgaggaaagaa

SEQ ID NO: 10372 - DNA, 20 bp, Artificial Sequence
  Description of Artificial Sequence: Synthetic oligonucleotide
ggcagggttgaggaaagaaa

SEQ ID NO: 10373 - DNA, 20 bp, Artificial Sequence
  Description of Artificial Sequence: Synthetic oligonucleotide
gcagggttgaggaaagaaag

SEQ ID NO: 10374 - DNA, 20 bp, Artificial Sequence
  Description of Artificial Sequence: Synthetic oligonucleotide
cagggttgaggaaagaaaga

SEQ ID NO: 10375 - DNA, 20 bp, Artificial Sequence
  Description of Artificial Sequence: Synthetic oligonucleotide
agggttgaggaaagaaagag

SEQ ID NO: 10376 - DNA, 20 bp, Artificial Sequence
  Description of Artificial Sequence: Synthetic oligonucleotide
gggttgaggaaagaaagagg

SEQ ID NO: 10377 - DNA, 20 bp, Artificial Sequence
  Description of Artificial Sequence: Synthetic oligonucleotide
ggttgaggaaagaaagaggg

SEQ ID NO: 10378 - DNA, 20 bp, Artificial Sequence
  Description of Artificial Sequence: Synthetic oligonucleotide
gttgaggaaagaaagaggga

SEQ ID NO: 10379 - DNA, 20 bp, Artificial Sequence
  Description of Artificial Sequence: Synthetic oligonucleotide
ttgaggaaagaaagagggag

SEQ ID NO: 10380 - DNA, 20 bp, Artificial Sequence
  Description of Artificial Sequence: Synthetic oligonucleotide
tgaggaaagaaagagggagg

SEQ ID NO: 10381 - DNA, 20 bp, Artificial Sequence
  Description of Artificial Sequence: Synthetic oligonucleotide
gaggaaagaaagagggaggg

SEQ ID NO: 10382 - DNA, 20 bp, Artificial Sequence
  Description of Artificial Sequence: Synthetic oligonucleotide
aggaaagaaagagggaggga

SEQ ID NO: 10383 - DNA, 20 bp, Artificial Sequence
  Description of Artificial Sequence: Synthetic oligonucleotide
ggaaagaaagagggagggag

SEQ ID NO: 10384 - DNA, 20 bp, Artificial Sequence
  Description of Artificial Sequence: Synthetic oligonucleotide
gaaagaaagagggagggagg

SEQ ID NO: 10385 - DNA, 20 bp, Artificial Sequence
  Description of Artificial Sequence: Synthetic oligonucleotide
aaagaaagagggagggagga

SEQ ID NO: 10386 - DNA, 20 bp, Artificial Sequence
  Description of Artificial Sequence: Synthetic oligonucleotide
aagaaagagggagggaggag

SEQ ID NO: 10387 - DNA, 20 bp, Artificial Sequence
  Description of Artificial Sequence: Synthetic oligonucleotide
agaaagagggagggaggagg

SEQ ID NO: 10388 - DNA, 20 bp, Artificial Sequence
  Description of Artificial Sequence: Synthetic oligonucleotide
gaaagagggagggaggaggg

SEQ ID NO: 10389 - DNA, 20 bp, Artificial Sequence
  Description of Artificial Sequence: Synthetic oligonucleotide
aaagagggagggaggagggg

SEQ ID NO: 10390 - DNA, 20 bp, Artificial Sequence
  Description of Artificial Sequence: Synthetic oligonucleotide
aagagggagggaggagggga

SEQ ID NO: 10391 - DNA, 20 bp, Artificial Sequence
  Description of Artificial Sequence: Synthetic oligonucleotide
agagggagggaggaggggag

SEQ ID NO: 10392 - DNA, 20 bp, Artificial Sequence
  Description of Artificial Sequence: Synthetic oligonucleotide
gagggagggaggaggggagg

SEQ ID NO: 10393 - DNA, 20 bp, Artificial Sequence
  Description of Artificial Sequence: Synthetic oligonucleotide
agggagggaggaggggagga

SEQ ID NO: 10394 - DNA, 20 bp, Artificial Sequence
  Description of Artificial Sequence: Synthetic oligonucleotide
gggagggaggaggggaggat

SEQ ID NO: 10395 - DNA, 20 bp, Artificial Sequence
  Description of Artificial Sequence: Synthetic oligonucleotide
ggagggaggaggggaggatg

SEQ ID NO: 10396 - DNA, 20 bp, Artificial Sequence
  Description of Artificial Sequence: Synthetic oligonucleotide
gagggaggaggggaggatgg

SEQ ID NO: 10397 - DNA, 20 bp, Artificial Sequence
  Description of Artificial Sequence: Synthetic oligonucleotide
agggaggaggggaggatggc

SEQ ID NO: 10398 - DNA, 20 bp, Artificial Sequence
  Description of Artificial Sequence: Synthetic oligonucleotide
gggaggaggggaggatggcg

SEQ ID NO: 10399 - DNA, 20 bp, Artificial Sequence
  Description of Artificial Sequence: Synthetic oligonucleotide
ggaggaggggaggatggcgt

SEQ ID NO: 10400 - DNA, 20 bp, Artificial Sequence
  Description of Artificial Sequence: Synthetic oligonucleotide
gaggaggggaggatggcgtt

SEQ ID NO: 10401 - DNA, 20 bp, Artificial Sequence
  Description of Artificial Sequence: Synthetic oligonucleotide
aggaggggaggatggcgttg

SEQ ID NO: 10402 - DNA, 20 bp, Artificial Sequence
  Description of Artificial Sequence: Synthetic oligonucleotide
ggaggggaggatggcgttga

SEQ ID NO: 10403 - DNA, 20 bp, Artificial Sequence
  Description of Artificial Sequence: Synthetic oligonucleotide
gaggggaggatggcgttgag

SEQ ID NO: 10404 - DNA, 20 bp, Artificial Sequence
  Description of Artificial Sequence: Synthetic oligonucleotide
aggggaggatggcgttgagc

SEQ ID NO: 10405 - DNA, 20 bp, Artificial Sequence
  Description of Artificial Sequence: Synthetic oligonucleotide
ggggaggatggcgttgagca

SEQ ID NO: 10406 - DNA, 20 bp, Artificial Sequence
  Description of Artificial Sequence: Synthetic oligonucleotide
gggaggatggcgttgagcac

SEQ ID NO: 10407 - DNA, 20 bp, Artificial Sequence
  Description of Artificial Sequence: Synthetic oligonucleotide
ggaggatggcgttgagcacg

SEQ ID NO: 10408 - DNA, 20 bp, Artificial Sequence
  Description of Artificial Sequence: Synthetic oligonucleotide
gaggatggcgttgagcacgt

SEQ ID NO: 10409 - DNA, 20 bp, Artificial Sequence
  Description of Artificial Sequence: Synthetic oligonucleotide
aggatggcgttgagcacgtc

SEQ ID NO: 10410 - DNA, 20 bp, Artificial Sequence
  Description of Artificial Sequence: Synthetic oligonucleotide
ggatggcgttgagcacgtct

SEQ ID NO: 10411 - DNA, 20 bp, Artificial Sequence
  Description of Artificial Sequence: Synthetic oligonucleotide
gatggcgttgagcacgtctg

SEQ ID NO: 10412 - DNA, 20 bp, Artificial Sequence
  Description of Artificial Sequence: Synthetic oligonucleotide
atggcgttgagcacgtctgg

SEQ ID NO: 10413 - DNA, 20 bp, Artificial Sequence
  Description of Artificial Sequence: Synthetic oligonucleotide
tggcgttgagcacgtctgga

SEQ ID NO: 10414 - DNA, 20 bp, Artificial Sequence
  Description of Artificial Sequence: Synthetic oligonucleotide
ggcgttgagcacgtctggag

SEQ ID NO: 10415 - DNA, 20 bp, Artificial Sequence
  Description of Artificial Sequence: Synthetic oligonucleotide
gcgttgagcacgtctggagg

SEQ ID NO: 10416 - DNA, 20 bp, Artificial Sequence
  Description of Artificial Sequence: Synthetic oligonucleotide
cgttgagcacgtctggaggc

SEQ ID NO: 10417 - DNA, 20 bp, Artificial Sequence
  Description of Artificial Sequence: Synthetic oligonucleotide
gttgagcacgtctggaggct

SEQ ID NO: 10418 - DNA, 20 bp, Artificial Sequence
  Description of Artificial Sequence: Synthetic oligonucleotide
ttgagcacgtctggaggctc

SEQ ID NO: 10419 - DNA, 20 bp, Artificial Sequence
  Description of Artificial Sequence: Synthetic oligonucleotide
tgagcacgtctggaggctca

SEQ ID NO: 10420 - DNA, 20 bp, Artificial Sequence
  Description of Artificial Sequence: Synthetic oligonucleotide
gagcacgtctggaggctcag

SEQ ID NO: 10421 - DNA, 20 bp, Artificial Sequence
  Description of Artificial Sequence: Synthetic oligonucleotide
agcacgtctggaggctcaga

SEQ ID NO: 10422 - DNA, 20 bp, Artificial Sequence
  Description of Artificial Sequence: Synthetic oligonucleotide
gcacgtctggaggctcagac

SEQ ID NO: 10423 - DNA, 20 bp, Artificial Sequence
  Description of Artificial Sequence: Synthetic oligonucleotide
cacgtctggaggctcagacg

SEQ ID NO: 10424 - DNA, 20 bp, Artificial Sequence
  Description of Artificial Sequence: Synthetic oligonucleotide
acgtctggaggctcagacgc

SEQ ID NO: 10425 - DNA, 20 bp, Artificial Sequence
  Description of Artificial Sequence: Synthetic oligonucleotide
cgtctggaggctcagacgct

SEQ ID NO: 10426 - DNA, 20 bp, Artificial Sequence
  Description of Artificial Sequence: Synthetic oligonucleotide
gtctggaggctcagacgctc

SEQ ID NO: 10427 - DNA, 20 bp, Artificial Sequence
  Description of Artificial Sequence: Synthetic oligonucleotide
tctggaggctcagacgctcc

SEQ ID NO: 10428 - DNA, 20 bp, Artificial Sequence
  Description of Artificial Sequence: Synthetic oligonucleotide
ctggaggctcagacgctcca

SEQ ID NO: 10429 - DNA, 20 bp, Artificial Sequence
  Description of Artificial Sequence: Synthetic oligonucleotide
tggaggctcagacgctccag

SEQ ID NO: 10430 - DNA, 20 bp, Artificial Sequence
  Description of Artificial Sequence: Synthetic oligonucleotide
ggaggctcagacgctccaga

SEQ ID NO: 10431 - DNA, 20 bp, Artificial Sequence
  Description of Artificial Sequence: Synthetic oligonucleotide
gaggctcagacgctccagac

SEQ ID NO: 10432 - DNA, 20 bp, Artificial Sequence
  Description of Artificial Sequence: Synthetic oligonucleotide
aggctcagacgctccagact

SEQ ID NO: 10433 - DNA, 20 bp, Artificial Sequence
  Description of Artificial Sequence: Synthetic oligonucleotide
ggctcagacgctccagactg

SEQ ID NO: 10434 - DNA, 20 bp, Artificial Sequence
  Description of Artificial Sequence: Synthetic oligonucleotide
gctcagacgctccagactgg

SEQ ID NO: 10435 - DNA, 20 bp, Artificial Sequence
  Description of Artificial Sequence: Synthetic oligonucleotide
ctcagacgctccagactggg

SEQ ID NO: 10436 - DNA, 20 bp, Artificial Sequence
  Description of Artificial Sequence: Synthetic oligonucleotide
tcagacgctccagactggga

SEQ ID NO: 10437 - DNA, 20 bp, Artificial Sequence
  Description of Artificial Sequence: Synthetic oligonucleotide
cagacgctccagactgggag

SEQ ID NO: 10438 - DNA, 20 bp, Artificial Sequence
  Description of Artificial Sequence: Synthetic oligonucleotide
agacgctccagactgggagg

SEQ ID NO: 10439 - DNA, 20 bp, Artificial Sequence
  Description of Artificial Sequence: Synthetic oligonucleotide
gacgctccagactgggagga

SEQ ID NO: 10440 - DNA, 20 bp, Artificial Sequence
  Description of Artificial Sequence: Synthetic oligonucleotide
acgctccagactgggaggaa

SEQ ID NO: 10441 - DNA, 20 bp, Artificial Sequence
  Description of Artificial Sequence: Synthetic oligonucleotide
cgctccagactgggaggaac

SEQ ID NO: 10442 - DNA, 20 bp, Artificial Sequence
  Description of Artificial Sequence: Synthetic oligonucleotide
gctccagactgggaggaacc

SEQ ID NO: 10443 - DNA, 20 bp, Artificial Sequence
  Description of Artificial Sequence: Synthetic oligonucleotide
ctccagactgggaggaaccg

SEQ ID NO: 10444 - DNA, 20 bp, Artificial Sequence
  Description of Artificial Sequence: Synthetic oligonucleotide
tccagactgggaggaaccgc

SEQ ID NO: 10445 - DNA, 20 bp, Artificial Sequence
  Description of Artificial Sequence: Synthetic oligonucleotide
ccagactgggaggaaccgcc

SEQ ID NO: 10446 - DNA, 20 bp, Artificial Sequence
  Description of Artificial Sequence: Synthetic oligonucleotide
cagactgggaggaaccgccc

SEQ ID NO: 10447 - DNA, 20 bp, Artificial Sequence
  Description of Artificial Sequence: Synthetic oligonucleotide
agactgggaggaaccgcccc

SEQ ID NO: 10448 - DNA, 20 bp, Artificial Sequence
  Description of Artificial Sequence: Synthetic oligonucleotide
gactgggaggaaccgccccc

SEQ ID NO: 10449 - DNA, 20 bp, Artificial Sequence
  Description of Artificial Sequence: Synthetic oligonucleotide
actgggaggaaccgccccca

SEQ ID NO: 10450 - DNA, 20 bp, Artificial Sequence
  Description of Artificial Sequence: Synthetic oligonucleotide
ctgggaggaaccgcccccag

SEQ ID NO: 10451 - DNA, 20 bp, Artificial Sequence
  Description of Artificial Sequence: Synthetic oligonucleotide
tgggaggaaccgcccccagc

SEQ ID NO: 10452 - DNA, 20 bp, Artificial Sequence
  Description of Artificial Sequence: Synthetic oligonucleotide
gggaggaaccgcccccagcc

SEQ ID NO: 10453 - DNA, 20 bp, Artificial Sequence
  Description of Artificial Sequence: Synthetic oligonucleotide
ggaggaaccgcccccagccc

SEQ ID NO: 10454 - DNA, 20 bp, Artificial Sequence
  Description of Artificial Sequence: Synthetic oligonucleotide
gaggaaccgcccccagccca

SEQ ID NO: 10455 - DNA, 20 bp, Artificial Sequence
  Description of Artificial Sequence: Synthetic oligonucleotide
aggaaccgcccccagcccag

SEQ ID NO: 10456 - DNA, 20 bp, Artificial Sequence
  Description of Artificial Sequence: Synthetic oligonucleotide
ggaaccgcccccagcccagc

SEQ ID NO: 10457 - DNA, 20 bp, Artificial Sequence
  Description of Artificial Sequence: Synthetic oligonucleotide
gaaccgcccccagcccagcc

SEQ ID NO: 10458 - DNA, 20 bp, Artificial Sequence
  Description of Artificial Sequence: Synthetic oligonucleotide
aaccgcccccagcccagccg

SEQ ID NO: 10459 - DNA, 20 bp, Artificial Sequence
  Description of Artificial Sequence: Synthetic oligonucleotide
accgcccccagcccagccgg

SEQ ID NO: 10460 - DNA, 20 bp, Artificial Sequence
  Description of Artificial Sequence: Synthetic oligonucleotide
ccgcccccagcccagccgga

SEQ ID NO: 10461 - DNA, 20 bp, Artificial Sequence
  Description of Artificial Sequence: Synthetic oligonucleotide
cgcccccagcccagccggaa

SEQ ID NO: 10462 - DNA, 20 bp, Artificial Sequence
  Description of Artificial Sequence: Synthetic oligonucleotide
gcccccagcccagccggaaa

SEQ ID NO: 10463 - DNA, 20 bp, Artificial Sequence
  Description of Artificial Sequence: Synthetic oligonucleotide
cccccagcccagccggaaaa

SEQ ID NO: 10464 - DNA, 20 bp, Artificial Sequence
  Description of Artificial Sequence: Synthetic oligonucleotide
ccccagcccagccggaaaag

SEQ ID NO: 10465 - DNA, 20 bp, Artificial Sequence
  Description of Artificial Sequence: Synthetic oligonucleotide
cccagcccagccggaaaagt

SEQ ID NO: 10466 - DNA, 20 bp, Artificial Sequence
  Description of Artificial Sequence: Synthetic oligonucleotide
ccagcccagccggaaaagta

SEQ ID NO: 10467 - DNA, 20 bp, Artificial Sequence
  Description of Artificial Sequence: Synthetic oligonucleotide
cagcccagccggaaaagtag

SEQ ID NO: 10468 - DNA, 20 bp, Artificial Sequence
  Description of Artificial Sequence: Synthetic oligonucleotide
agcccagccggaaaagtagg

SEQ ID NO: 10469 - DNA, 20 bp, Artificial Sequence
  Description of Artificial Sequence: Synthetic oligonucleotide
gcccagccggaaaagtaggg

SEQ ID NO: 10470 - DNA, 20 bp, Artificial Sequence
  Description of Artificial Sequence: Synthetic oligonucleotide
cccagccggaaaagtagggg

SEQ ID NO: 10471 - DNA, 20 bp, Artificial Sequence
  Description of Artificial Sequence: Synthetic oligonucleotide
ccagccggaaaagtagggga

SEQ ID NO: 10472 - DNA, 20 bp, Artificial Sequence
  Description of Artificial Sequence: Synthetic oligonucleotide
cagccggaaaagtaggggaa

SEQ ID NO: 10473 - DNA, 20 bp, Artificial Sequence
  Description of Artificial Sequence: Synthetic oligonucleotide
agccggaaaagtaggggaaa

SEQ ID NO: 10474 - DNA, 20 bp, Artificial Sequence
  Description of Artificial Sequence: Synthetic oligonucleotide
gccggaaaagtaggggaaag

SEQ ID NO: 10475 - DNA, 20 bp, Artificial Sequence
  Description of Artificial Sequence: Synthetic oligonucleotide
ccggaaaagtaggggaaagg

SEQ ID NO: 10476 - DNA, 20 bp, Artificial Sequence
  Description of Artificial Sequence: Synthetic oligonucleotide
cggaaaagtaggggaaaggt

SEQ ID NO: 10477 - DNA, 20 bp, Artificial Sequence
  Description of Artificial Sequence: Synthetic oligonucleotide
ggaaaagtaggggaaaggtc

SEQ ID NO: 10478 - DNA, 20 bp, Artificial Sequence
  Description of Artificial Sequence: Synthetic oligonucleotide
gaaaagtaggggaaaggtcg

SEQ ID NO: 10479 - DNA, 20 bp, Artificial Sequence
  Description of Artificial Sequence: Synthetic oligonucleotide
aaaagtaggggaaaggtcga

SEQ ID NO: 10480 - DNA, 20 bp, Artificial Sequence
  Description of Artificial Sequence: Synthetic oligonucleotide
aaagtaggggaaaggtcgaa

SEQ ID NO: 10481 - DNA, 20 bp, Artificial Sequence
  Description of Artificial Sequence: Synthetic oligonucleotide
aagtaggggaaaggtcgaaa

SEQ ID NO: 10482 - DNA, 20 bp, Artificial Sequence
  Description of Artificial Sequence: Synthetic oligonucleotide
agtaggggaaaggtcgaaat

SEQ ID NO: 10483 - DNA, 20 bp, Artificial Sequence
  Description of Artificial Sequence: Synthetic oligonucleotide
gtaggggaaaggtcgaaatg

SEQ ID NO: 10484 - DNA, 20 bp, Artificial Sequence
  Description of Artificial Sequence: Synthetic oligonucleotide
taggggaaaggtcgaaatga

SEQ ID NO: 10485 - DNA, 20 bp, Artificial Sequence
  Description of Artificial Sequence: Synthetic oligonucleotide
aggggaaaggtcgaaatgag

SEQ ID NO: 10486 - DNA, 20 bp, Artificial Sequence
  Description of Artificial Sequence: Synthetic oligonucleotide
ggggaaaggtcgaaatgagt

SEQ ID NO: 10487 - DNA, 20 bp, Artificial Sequence
  Description of Artificial Sequence: Synthetic oligonucleotide
gggaaaggtcgaaatgagtc

SEQ ID NO: 10488 - DNA, 20 bp, Artificial Sequence
  Description of Artificial Sequence: Synthetic oligonucleotide
ggaaaggtcgaaatgagtct

SEQ ID NO: 10489 - DNA, 20 bp, Artificial Sequence
  Description of Artificial Sequence: Synthetic oligonucleotide
gaaaggtcgaaatgagtctg

SEQ ID NO: 10490 - DNA, 20 bp, Artificial Sequence
  Description of Artificial Sequence: Synthetic oligonucleotide
aaaggtcgaaatgagtctgc

SEQ ID NO: 10491 - DNA, 20 bp, Artificial Sequence
  Description of Artificial Sequence: Synthetic oligonucleotide
aaggtcgaaatgagtctgca

SEQ ID NO: 10492 - DNA, 20 bp, Artificial Sequence
  Description of Artificial Sequence: Synthetic oligonucleotide
aggtcgaaatgagtctgcac

SEQ ID NO: 10493 - DNA, 20 bp, Artificial Sequence
  Description of Artificial Sequence: Synthetic oligonucleotide
ggtcgaaatgagtctgcacg

SEQ ID NO: 10494 - DNA, 20 bp, Artificial Sequence
  Description of Artificial Sequence: Synthetic oligonucleotide
gtcgaaatgagtctgcacgg

SEQ ID NO: 10495 - DNA, 20 bp, Artificial Sequence
  Description of Artificial Sequence: Synthetic oligonucleotide
tcgaaatgagtctgcacggt

SEQ ID NO: 10496 - DNA, 20 bp, Artificial Sequence
  Description of Artificial Sequence: Synthetic oligonucleotide
cgaaatgagtctgcacggtg

SEQ ID NO: 10497 - DNA, 20 bp, Artificial Sequence
  Description of Artificial Sequence: Synthetic oligonucleotide
gaaatgagtctgcacggtgg

SEQ ID NO: 10498 - DNA, 20 bp, Artificial Sequence
  Description of Artificial Sequence: Synthetic oligonucleotide
aaatgagtctgcacggtggg

SEQ ID NO: 10499 - DNA, 20 bp, Artificial Sequence
  Description of Artificial Sequence: Synthetic oligonucleotide
aatgagtctgcacggtgggg

SEQ ID NO: 10500 - DNA, 20 bp, Artificial Sequence
  Description of Artificial Sequence: Synthetic oligonucleotide
atgagtctgcacggtggggg

SEQ ID NO: 10501 - DNA, 20 bp, Artificial Sequence
  Description of Artificial Sequence: Synthetic oligonucleotide
tgagtctgcacggtgggggt

SEQ ID NO: 10502 - DNA, 20 bp, Artificial Sequence
  Description of Artificial Sequence: Synthetic oligonucleotide
gagtctgcacggtgggggtg

SEQ ID NO: 10503 - DNA, 20 bp, Artificial Sequence
  Description of Artificial Sequence: Synthetic oligonucleotide
agtctgcacggtgggggtgg

SEQ ID NO: 10504 - DNA, 20 bp, Artificial Sequence
  Description of Artificial Sequence: Synthetic oligonucleotide
gtctgcacggtgggggtggg

SEQ ID NO: 10505 - DNA, 20 bp, Artificial Sequence
  Description of Artificial Sequence: Synthetic oligonucleotide
tctgcacggtgggggtgggg

SEQ ID NO: 10506 - DNA, 20 bp, Artificial Sequence
  Description of Artificial Sequence: Synthetic oligonucleotide
ctgcacggtgggggtggggg

SEQ ID NO: 10507 - DNA, 20 bp, Artificial Sequence
  Description of Artificial Sequence: Synthetic oligonucleotide
tgcacggtgggggtgggggc

SEQ ID NO: 10508 - DNA, 20 bp, Artificial Sequence
  Description of Artificial Sequence: Synthetic oligonucleotide
gcacggtgggggtgggggcg

SEQ ID NO: 10509 - DNA, 20 bp, Artificial Sequence
  Description of Artificial Sequence: Synthetic oligonucleotide
cacggtgggggtgggggcgg

SEQ ID NO: 10510 - DNA, 20 bp, Artificial Sequence
  Description of Artificial Sequence: Synthetic oligonucleotide
acggtgggggtgggggcggg

SEQ ID NO: 10511 - DNA, 20 bp, Artificial Sequence
  Description of Artificial Sequence: Synthetic oligonucleotide
cggtgggggtgggggcgggc

SEQ ID NO: 10512 - DNA, 20 bp, Artificial Sequence
  Description of Artificial Sequence: Synthetic oligonucleotide
ggtgggggtgggggcgggcc

SEQ ID NO: 10513 - DNA, 20 bp, Artificial Sequence
  Description of Artificial Sequence: Synthetic oligonucleotide
gtgggggtgggggcgggccc

SEQ ID NO: 10514 - DNA, 20 bp, Artificial Sequence
  Description of Artificial Sequence: Synthetic oligonucleotide
tgggggtgggggcgggccca

SEQ ID NO: 10515 - DNA, 20 bp, Artificial Sequence
  Description of Artificial Sequence: Synthetic oligonucleotide
gggggtgggggcgggcccag

SEQ ID NO: 10516 - DNA, 20 bp, Artificial Sequence
  Description of Artificial Sequence: Synthetic oligonucleotide
ggggtgggggcgggcccaga

SEQ ID NO: 10517 - DNA, 20 bp, Artificial Sequence
  Description of Artificial Sequence: Synthetic oligonucleotide
gggtgggggcgggcccagag

SEQ ID NO: 10518 - DNA, 20 bp, Artificial Sequence
  Description of Artificial Sequence: Synthetic oligonucleotide
ggtgggggcgggcccagagt

SEQ ID NO: 10519 - DNA, 20 bp, Artificial Sequence
  Description of Artificial Sequence: Synthetic oligonucleotide
gtgggggcgggcccagagtg

SEQ ID NO: 10520 - DNA, 20 bp, Artificial Sequence
  Description of Artificial Sequence: Synthetic oligonucleotide
tgggggcgggcccagagtga

SEQ ID NO: 10521 - DNA, 20 bp, Artificial Sequence
  Description of Artificial Sequence: Synthetic oligonucleotide
gggggcgggcccagagtgac

SEQ ID NO: 10522 - DNA, 20 bp, Artificial Sequence
  Description of Artificial Sequence: Synthetic oligonucleotide
ggggcgggcccagagtgacc

SEQ ID NO: 10523 - DNA, 20 bp, Artificial Sequence
  Description of Artificial Sequence: Synthetic oligonucleotide
gggcgggcccagagtgacca

SEQ ID NO: 10524 - DNA, 20 bp, Artificial Sequence
  Description of Artificial Sequence: Synthetic oligonucleotide
ggcgggcccagagtgaccag

SEQ ID NO: 10525 - DNA, 20 bp, Artificial Sequence
  Description of Artificial Sequence: Synthetic oligonucleotide
gcgggcccagagtgaccagg

SEQ ID NO: 10526 - DNA, 20 bp, Artificial Sequence
  Description of Artificial Sequence: Synthetic oligonucleotide
cgggcccagagtgaccagga

SEQ ID NO: 10527 - DNA, 20 bp, Artificial Sequence
  Description of Artificial Sequence: Synthetic oligonucleotide
gggcccagagtgaccaggaa

SEQ ID NO: 10528 - DNA, 20 bp, Artificial Sequence
  Description of Artificial Sequence: Synthetic oligonucleotide
ggcccagagtgaccaggaag

SEQ ID NO: 10529 - DNA, 20 bp, Artificial Sequence
  Description of Artificial Sequence: Synthetic oligonucleotide
gcccagagtgaccaggaaga

SEQ ID NO: 10530 - DNA, 20 bp, Artificial Sequence
  Description of Artificial Sequence: Synthetic oligonucleotide
cccagagtgaccaggaagac

SEQ ID NO: 10531 - DNA, 20 bp, Artificial Sequence
  Description of Artificial Sequence: Synthetic oligonucleotide
ccagagtgaccaggaagacg

SEQ ID NO: 10532 - DNA, 20 bp, Artificial Sequence
  Description of Artificial Sequence: Synthetic oligonucleotide
cagagtgaccaggaagacgc

SEQ ID NO: 10533 - DNA, 20 bp, Artificial Sequence
  Description of Artificial Sequence: Synthetic oligonucleotide
agagtgaccaggaagacgct

SEQ ID NO: 10534 - DNA, 20 bp, Artificial Sequence
  Description of Artificial Sequence: Synthetic oligonucleotide
gagtgaccaggaagacgctt

SEQ ID NO: 10535 - DNA, 20 bp, Artificial Sequence
  Description of Artificial Sequence: Synthetic oligonucleotide
agtgaccaggaagacgcttt

SEQ ID NO: 10536 - DNA, 20 bp, Artificial Sequence
  Description of Artificial Sequence: Synthetic oligonucleotide
gtgaccaggaagacgctttc

SEQ ID NO: 10537 - DNA, 20 bp, Artificial Sequence
  Description of Artificial Sequence: Synthetic oligonucleotide
tgaccaggaagacgctttcc

SEQ ID NO: 10538 - DNA, 20 bp, Artificial Sequence
  Description of Artificial Sequence: Synthetic oligonucleotide
gaccaggaagacgctttccg

SEQ ID NO: 10539 - DNA, 20 bp, Artificial Sequence
  Description of Artificial Sequence: Synthetic oligonucleotide
accaggaagacgctttccgg

SEQ ID NO: 10540 - DNA, 20 bp, Artificial Sequence
  Description of Artificial Sequence: Synthetic oligonucleotide
ccaggaagacgctttccggc

SEQ ID NO: 10541 - DNA, 20 bp, Artificial Sequence
  Description of Artificial Sequence: Synthetic oligonucleotide
caggaagacgctttccggcc

SEQ ID NO: 10542 - DNA, 20 bp, Artificial Sequence
  Description of Artificial Sequence: Synthetic oligonucleotide
aggaagacgctttccggccc

SEQ ID NO: 10543 - DNA, 20 bp, Artificial Sequence
  Description of Artificial Sequence: Synthetic oligonucleotide
ggaagacgctttccggcccc

SEQ ID NO: 10544 - DNA, 20 bp, Artificial Sequence
  Description of Artificial Sequence: Synthetic oligonucleotide
gaagacgctttccggcccct

SEQ ID NO: 10545 - DNA, 20 bp, Artificial Sequence
  Description of Artificial Sequence: Synthetic oligonucleotide
aagacgctttccggcccctc

SEQ ID NO: 10546 - DNA, 20 bp, Artificial Sequence
  Description of Artificial Sequence: Synthetic oligonucleotide
agacgctttccggcccctca

SEQ ID NO: 10547 - DNA, 20 bp, Artificial Sequence
  Description of Artificial Sequence: Synthetic oligonucleotide
gacgctttccggcccctcag

SEQ ID NO: 10548 - DNA, 20 bp, Artificial Sequence
  Description of Artificial Sequence: Synthetic oligonucleotide
acgctttccggcccctcagg

SEQ ID NO: 10549 - DNA, 20 bp, Artificial Sequence
  Description of Artificial Sequence: Synthetic oligonucleotide
cgctttccggcccctcaggc

SEQ ID NO: 10550 - DNA, 20 bp, Artificial Sequence
  Description of Artificial Sequence: Synthetic oligonucleotide
gctttccggcccctcaggca

SEQ ID NO: 10551 - DNA, 20 bp, Artificial Sequence
  Description of Artificial Sequence: Synthetic oligonucleotide
ctttccggcccctcaggcat

SEQ ID NO: 10552 - DNA, 20 bp, Artificial Sequence
  Description of Artificial Sequence: Synthetic oligonucleotide
tttccggcccctcaggcatc

SEQ ID NO: 10553 - DNA, 20 bp, Artificial Sequence
  Description of Artificial Sequence: Synthetic oligonucleotide
ttccggcccctcaggcatct

SEQ ID NO: 10554 - DNA, 20 bp, Artificial Sequence
  Description of Artificial Sequence: Synthetic oligonucleotide
tccggcccctcaggcatctc

SEQ ID NO: 10555 - DNA, 20 bp, Artificial Sequence
  Description of Artificial Sequence: Synthetic oligonucleotide
ccggcccctcaggcatctcc

SEQ ID NO: 10556 - DNA, 20 bp, Artificial Sequence
  Description of Artificial Sequence: Synthetic oligonucleotide
cggcccctcaggcatctccc

SEQ ID NO: 10557 - DNA, 20 bp, Artificial Sequence
  Description of Artificial Sequence: Synthetic oligonucleotide
ggcccctcaggcatctcccc

SEQ ID NO: 10558 - DNA, 20 bp, Artificial Sequence
  Description of Artificial Sequence: Synthetic oligonucleotide
gcccctcaggcatctcccct

SEQ ID NO: 10559 - DNA, 20 bp, Artificial Sequence
  Description of Artificial Sequence: Synthetic oligonucleotide
cccctcaggcatctcccctt

SEQ ID NO: 10560 - DNA, 20 bp, Artificial Sequence
  Description of Artificial Sequence: Synthetic oligonucleotide
ccctcaggcatctccccttt

SEQ ID NO: 10561 - DNA, 20 bp, Artificial Sequence
  Description of Artificial Sequence: Synthetic oligonucleotide
cctcaggcatctcccctttc

SEQ ID NO: 10562 - DNA, 20 bp, Artificial Sequence
  Description of Artificial Sequence: Synthetic oligonucleotide
ctcaggcatctcccctttcc

SEQ ID NO: 10563 - DNA, 20 bp, Artificial Sequence
  Description of Artificial Sequence: Synthetic oligonucleotide
tcaggcatctcccctttccc

SEQ ID NO: 10564 - DNA, 20 bp, Artificial Sequence
  Description of Artificial Sequence: Synthetic oligonucleotide
caggcatctcccctttcccc

SEQ ID NO: 10565 - DNA, 20 bp, Artificial Sequence
  Description of Artificial Sequence: Synthetic oligonucleotide
aggcatctcccctttcccct

SEQ ID NO: 10566 - DNA, 20 bp, Artificial Sequence
  Description of Artificial Sequence: Synthetic oligonucleotide
ggcatctcccctttccccta

SEQ ID NO: 10567 - DNA, 20 bp, Artificial Sequence
  Description of Artificial Sequence: Synthetic oligonucleotide
gcatctcccctttcccctac

SEQ ID NO: 10568 - DNA, 20 bp, Artificial Sequence
  Description of Artificial Sequence: Synthetic oligonucleotide
catctcccctttcccctact

SEQ ID NO: 10569 - DNA, 20 bp, Artificial Sequence
  Description of Artificial Sequence: Synthetic oligonucleotide
atctcccctttcccctactt

SEQ ID NO: 10570 - DNA, 20 bp, Artificial Sequence
  Description of Artificial Sequence: Synthetic oligonucleotide
tctcccctttcccctacttt

SEQ ID NO: 10571 - DNA, 20 bp, Artificial Sequence
  Description of Artificial Sequence: Synthetic oligonucleotide
ctcccctttcccctactttc

SEQ ID NO: 10572 - DNA, 20 bp, Artificial Sequence
  Description of Artificial Sequence: Synthetic oligonucleotide
tcccctttcccctactttcc

SEQ ID NO: 10573 - DNA, 20 bp, Artificial Sequence
  Description of Artificial Sequence: Synthetic oligonucleotide
cccctttcccctactttcct

SEQ ID NO: 10574 - DNA, 20 bp, Artificial Sequence
  Description of Artificial Sequence: Synthetic oligonucleotide
ccctttcccctactttcctc

SEQ ID NO: 10575 - DNA, 20 bp, Artificial Sequence
  Description of Artificial Sequence: Synthetic oligonucleotide
cctttcccctactttcctcc

SEQ ID NO: 10576 - DNA, 20 bp, Artificial Sequence
  Description of Artificial Sequence: Synthetic oligonucleotide
ctttcccctactttcctccc

SEQ ID NO: 10577 - DNA, 20 bp, Artificial Sequence
  Description of Artificial Sequence: Synthetic oligonucleotide
tttcccctactttcctccca

SEQ ID NO: 10578 - DNA, 20 bp, Artificial Sequence
  Description of Artificial Sequence: Synthetic oligonucleotide
ttcccctactttcctcccat

SEQ ID NO: 10579 - DNA, 20 bp, Artificial Sequence
  Description of Artificial Sequence: Synthetic oligonucleotide
tcccctactttcctcccatc

SEQ ID NO: 10580 - DNA, 20 bp, Artificial Sequence
  Description of Artificial Sequence: Synthetic oligonucleotide
cccctactttcctcccatcc

SEQ ID NO: 10581 - DNA, 20 bp, Artificial Sequence
  Description of Artificial Sequence: Synthetic oligonucleotide
ccctactttcctcccatcca

SEQ ID NO: 10582 - DNA, 20 bp, Artificial Sequence
  Description of Artificial Sequence: Synthetic oligonucleotide
cctactttcctcccatccag

SEQ ID NO: 10583 - DNA, 20 bp, Artificial Sequence
  Description of Artificial Sequence: Synthetic oligonucleotide
ctactttcctcccatccagt

SEQ ID NO: 10584 - DNA, 20 bp, Artificial Sequence
  Description of Artificial Sequence: Synthetic oligonucleotide
tactttcctcccatccagta

SEQ ID NO: 10585 - DNA, 20 bp, Artificial Sequence
  Description of Artificial Sequence: Synthetic oligonucleotide
actttcctcccatccagtaa

SEQ ID NO: 10586 - DNA, 20 bp, Artificial Sequence
  Description of Artificial Sequence: Synthetic oligonucleotide
ctttcctcccatccagtaag

SEQ ID NO: 10587 - DNA, 20 bp, Artificial Sequence
  Description of Artificial Sequence: Synthetic oligonucleotide
tttcctcccatccagtaagg

SEQ ID NO: 10588 - DNA, 20 bp, Artificial Sequence
  Description of Artificial Sequence: Synthetic oligonucleotide
ttcctcccatccagtaagga

SEQ ID NO: 10589 - DNA, 20 bp, Artificial Sequence
  Description of Artificial Sequence: Synthetic oligonucleotide
tcctcccatccagtaaggat

SEQ ID NO: 10590 - DNA, 20 bp, Artificial Sequence
  Description of Artificial Sequence: Synthetic oligonucleotide
cctcccatccagtaaggatg

SEQ ID NO: 10591 - DNA, 20 bp, Artificial Sequence
  Description of Artificial Sequence: Synthetic oligonucleotide
ctcccatccagtaaggatgg

SEQ ID NO: 10592 - DNA, 20 bp, Artificial Sequence
  Description of Artificial Sequence: Synthetic oligonucleotide
tcccatccagtaaggatggg

SEQ ID NO: 10593 - DNA, 20 bp, Artificial Sequence
  Description of Artificial Sequence: Synthetic oligonucleotide
cccatccagtaaggatgggc

SEQ ID NO: 10594 - DNA, 20 bp, Artificial Sequence
  Description of Artificial Sequence: Synthetic oligonucleotide
ccatccagtaaggatgggca

SEQ ID NO: 10595 - DNA, 20 bp, Artificial Sequence
  Description of Artificial Sequence: Synthetic oligonucleotide
catccagtaaggatgggcac

SEQ ID NO: 10596 - DNA, 20 bp, Artificial Sequence
  Description of Artificial Sequence: Synthetic oligonucleotide
atccagtaaggatgggcacg

SEQ ID NO: 10597 - DNA, 20 bp, Artificial Sequence
  Description of Artificial Sequence: Synthetic oligonucleotide
tccagtaaggatgggcacgc

SEQ ID NO: 10598 - DNA, 20 bp, Artificial Sequence
  Description of Artificial Sequence: Synthetic oligonucleotide
ccagtaaggatgggcacgcg

SEQ ID NO: 10599 - DNA, 20 bp, Artificial Sequence
  Description of Artificial Sequence: Synthetic oligonucleotide
cagtaaggatgggcacgcgg

SEQ ID NO: 10600 - DNA, 20 bp, Artificial Sequence
  Description of Artificial Sequence: Synthetic oligonucleotide
agtaaggatgggcacgcggc

SEQ ID NO: 10601 - DNA, 20 bp, Artificial Sequence
  Description of Artificial Sequence: Synthetic oligonucleotide
gtaaggatgggcacgcggcc

SEQ ID NO: 10602 - DNA, 20 bp, Artificial Sequence
  Description of Artificial Sequence: Synthetic oligonucleotide
taaggatgggcacgcggcca

SEQ ID NO: 10603 - DNA, 20 bp, Artificial Sequence
  Description of Artificial Sequence: Synthetic oligonucleotide
aaggatgggcacgcggccaa

SEQ ID NO: 10604 - DNA, 20 bp, Artificial Sequence
  Description of Artificial Sequence: Synthetic oligonucleotide
aggatgggcacgcggccaaa

SEQ ID NO: 10605 - DNA, 20 bp, Artificial Sequence
  Description of Artificial Sequence: Synthetic oligonucleotide
ggatgggcacgcggccaaac

SEQ ID NO: 10606 - DNA, 20 bp, Artificial Sequence
  Description of Artificial Sequence: Synthetic oligonucleotide
gatgggcacgcggccaaacc

SEQ ID NO: 10607 - DNA, 20 bp, Artificial Sequence
  Description of Artificial Sequence: Synthetic oligonucleotide
atgggcacgcggccaaacca

SEQ ID NO: 10608 - DNA, 20 bp, Artificial Sequence
  Description of Artificial Sequence: Synthetic oligonucleotide
tgggcacgcggccaaaccac

SEQ ID NO: 10609 - DNA, 20 bp, Artificial Sequence
  Description of Artificial Sequence: Synthetic oligonucleotide
gggcacgcggccaaaccacc

SEQ ID NO: 10610 - DNA, 20 bp, Artificial Sequence
  Description of Artificial Sequence: Synthetic oligonucleotide
ggcacgcggccaaaccacca

SEQ ID NO: 10611 - DNA, 20 bp, Artificial Sequence
  Description of Artificial Sequence: Synthetic oligonucleotide
gcacgcggccaaaccaccag

SEQ ID NO: 10612 - DNA, 20 bp, Artificial Sequence
  Description of Artificial Sequence: Synthetic oligonucleotide
cacgcggccaaaccaccagt

SEQ ID NO: 10613 - DNA, 20 bp, Artificial Sequence
  Description of Artificial Sequence: Synthetic oligonucleotide
acgcggccaaaccaccagtg

SEQ ID NO: 10614 - DNA, 20 bp, Artificial Sequence
  Description of Artificial Sequence: Synthetic oligonucleotide
cgcggccaaaccaccagtgt

SEQ ID NO: 10615 - DNA, 20 bp, Artificial Sequence
  Description of Artificial Sequence: Synthetic oligonucleotide
gcggccaaaccaccagtgtg

SEQ ID NO: 10616 - DNA, 20 bp, Artificial Sequence
  Description of Artificial Sequence: Synthetic oligonucleotide
cggccaaaccaccagtgtgg

SEQ ID NO: 10617 - DNA, 20 bp, Artificial Sequence
  Description of Artificial Sequence: Synthetic oligonucleotide
ggccaaaccaccagtgtggc

SEQ ID NO: 10618 - DNA, 20 bp, Artificial Sequence
  Description of Artificial Sequence: Synthetic oligonucleotide
gccaaaccaccagtgtggct

SEQ ID NO: 10619 - DNA, 20 bp, Artificial Sequence
  Description of Artificial Sequence: Synthetic oligonucleotide
ccaaaccaccagtgtggctt

SEQ ID NO: 10620 - DNA, 20 bp, Artificial Sequence
  Description of Artificial Sequence: Synthetic oligonucleotide
caaaccaccagtgtggcttc

SEQ ID NO: 10621 - DNA, 20 bp, Artificial Sequence
  Description of Artificial Sequence: Synthetic oligonucleotide
aaaccaccagtgtggcttcc

SEQ ID NO: 10622 - DNA, 20 bp, Artificial Sequence
  Description of Artificial Sequence: Synthetic oligonucleotide
aaccaccagtgtggcttcca

SEQ ID NO: 10623 - DNA, 20 bp, Artificial Sequence
  Description of Artificial Sequence: Synthetic oligonucleotide
accaccagtgtggcttccat

SEQ ID NO: 10624 - DNA, 20 bp, Artificial Sequence
  Description of Artificial Sequence: Synthetic oligonucleotide
ccaccagtgtggcttccatg

SEQ ID NO: 10625 - DNA, 20 bp, Artificial Sequence
  Description of Artificial Sequence: Synthetic oligonucleotide
caccagtgtggcttccatga

SEQ ID NO: 10626 - DNA, 20 bp, Artificial Sequence
  Description of Artificial Sequence: Synthetic oligonucleotide
accagtgtggcttccatgaa

SEQ ID NO: 10627 - DNA, 20 bp, Artificial Sequence
  Description of Artificial Sequence: Synthetic oligonucleotide
ccagtgtggcttccatgaat

SEQ ID NO: 10628 - DNA, 20 bp, Artificial Sequence
  Description of Artificial Sequence: Synthetic oligonucleotide
cagtgtggcttccatgaatg

SEQ ID NO: 10629 - DNA, 20 bp, Artificial Sequence
  Description of Artificial Sequence: Synthetic oligonucleotide
agtgtggcttccatgaatgc

SEQ ID NO: 10630 - DNA, 20 bp, Artificial Sequence
  Description of Artificial Sequence: Synthetic oligonucleotide
gtgtggcttccatgaatgcc

SEQ ID NO: 10631 - DNA, 20 bp, Artificial Sequence
  Description of Artificial Sequence: Synthetic oligonucleotide
tgtggcttccatgaatgcca

SEQ ID NO: 10632 - DNA, 20 bp, Artificial Sequence
  Description of Artificial Sequence: Synthetic oligonucleotide
gtggcttccatgaatgccag

SEQ ID NO: 10633 - DNA, 20 bp, Artificial Sequence
  Description of Artificial Sequence: Synthetic oligonucleotide
tggcttccatgaatgccagc

SEQ ID NO: 10634 - DNA, 20 bp, Artificial Sequence
  Description of Artificial Sequence: Synthetic oligonucleotide
ggcttccatgaatgccagct

SEQ ID NO: 10635 - DNA, 20 bp, Artificial Sequence
  Description of Artificial Sequence: Synthetic oligonucleotide
gcttccatgaatgccagctg

SEQ ID NO: 10636 - DNA, 20 bp, Artificial Sequence
  Description of Artificial Sequence: Synthetic oligonucleotide
cttccatgaatgccagctgt

SEQ ID NO: 10637 - DNA, 20 bp, Artificial Sequence
  Description of Artificial Sequence: Synthetic oligonucleotide
ttccatgaatgccagctgtt

SEQ ID NO: 10638 - DNA, 20 bp, Artificial Sequence
  Description of Artificial Sequence: Synthetic oligonucleotide
tccatgaatgccagctgttc

SEQ ID NO: 10639 - DNA, 20 bp, Artificial Sequence
  Description of Artificial Sequence: Synthetic oligonucleotide
ccatgaatgccagctgttcg

SEQ ID NO: 10640 - DNA, 20 bp, Artificial Sequence
  Description of Artificial Sequence: Synthetic oligonucleotide
catgaatgccagctgttcgc

SEQ ID NO: 10641 - DNA, 20 bp, Artificial Sequence
  Description of Artificial Sequence: Synthetic oligonucleotide
atgaatgccagctgttcgcc

SEQ ID NO: 10642 - DNA, 20 bp, Artificial Sequence
  Description of Artificial Sequence: Synthetic oligonucleotide
tgaatgccagctgttcgcct

SEQ ID NO: 10643 - DNA, 20 bp, Artificial Sequence
  Description of Artificial Sequence: Synthetic oligonucleotide
gaatgccagctgttcgcctt

SEQ ID NO: 10644 - DNA, 20 bp, Artificial Sequence
  Description of Artificial Sequence: Synthetic oligonucleotide
aatgccagctgttcgccttc

SEQ ID NO: 10645 - DNA, 20 bp, Artificial Sequence
  Description of Artificial Sequence: Synthetic oligonucleotide
atgccagctgttcgccttcc

SEQ ID NO: 10646 - DNA, 20 bp, Artificial Sequence
  Description of Artificial Sequence: Synthetic oligonucleotide
tgccagctgttcgccttccc

SEQ ID NO: 10647 - DNA, 20 bp, Artificial Sequence
  Description of Artificial Sequence: Synthetic oligonucleotide
gccagctgttcgccttccca

SEQ ID NO: 10648 - DNA, 20 bp, Artificial Sequence
  Description of Artificial Sequence: Synthetic oligonucleotide
ccagctgttcgccttcccag

SEQ ID NO: 10649 - DNA, 20 bp, Artificial Sequence
  Description of Artificial Sequence: Synthetic oligonucleotide
cagctgttcgccttcccagc

SEQ ID NO: 10650 - DNA, 20 bp, Artificial Sequence
  Description of Artificial Sequence: Synthetic oligonucleotide
agctgttcgccttcccagct

SEQ ID NO: 10651 - DNA, 20 bp, Artificial Sequence
  Description of Artificial Sequence: Synthetic oligonucleotide
gctgttcgccttcccagctc

SEQ ID NO: 10652 - DNA, 20 bp, Artificial Sequence
  Description of Artificial Sequence: Synthetic oligonucleotide
ctgttcgccttcccagctct

SEQ ID NO: 10653 - DNA, 20 bp, Artificial Sequence
  Description of Artificial Sequence: Synthetic oligonucleotide
tgttcgccttcccagctctg

SEQ ID NO: 10654 - DNA, 20 bp, Artificial Sequence
  Description of Artificial Sequence: Synthetic oligonucleotide
gttcgccttcccagctctga

SEQ ID NO: 10655 - DNA, 20 bp, Artificial Sequence
  Description of Artificial Sequence: Synthetic oligonucleotide
ttcgccttcccagctctgaa

SEQ ID NO: 10656 - DNA, 20 bp, Artificial Sequence
  Description of Artificial Sequence: Synthetic oligonucleotide
tcgccttcccagctctgaac

SEQ ID NO: 10657 - DNA, 20 bp, Artificial Sequence
  Description of Artificial Sequence: Synthetic oligonucleotide
cgccttcccagctctgaact

SEQ ID NO: 10658 - DNA, 20 bp, Artificial Sequence
  Description of Artificial Sequence: Synthetic oligonucleotide
gccttcccagctctgaactt

SEQ ID NO: 10659 - DNA, 20 bp, Artificial Sequence
  Description of Artificial Sequence: Synthetic oligonucleotide
ccttcccagctctgaacttt

SEQ ID NO: 10660 - DNA, 20 bp, Artificial Sequence
  Description of Artificial Sequence: Synthetic oligonucleotide
cttcccagctctgaactttc

SEQ ID NO: 10661 - DNA, 20 bp, Artificial Sequence
  Description of Artificial Sequence: Synthetic oligonucleotide
ttcccagctctgaactttct

SEQ ID NO: 10662 - DNA, 20 bp, Artificial Sequence
  Description of Artificial Sequence: Synthetic oligonucleotide
tcccagctctgaactttctc

SEQ ID NO: 10663 - DNA, 20 bp, Artificial Sequence
  Description of Artificial Sequence: Synthetic oligonucleotide
cccagctctgaactttctcc

SEQ ID NO: 10664 - DNA, 20 bp, Artificial Sequence
  Description of Artificial Sequence: Synthetic oligonucleotide
ccagctctgaactttctcct

SEQ ID NO: 10665 - DNA, 20 bp, Artificial Sequence
  Description of Artificial Sequence: Synthetic oligonucleotide
cagctctgaactttctccta

SEQ ID NO: 10666 - DNA, 20 bp, Artificial Sequence
  Description of Artificial Sequence: Synthetic oligonucleotide
agctctgaactttctcctac

SEQ ID NO: 10667 - DNA, 20 bp, Artificial Sequence
  Description of Artificial Sequence: Synthetic oligonucleotide
gctctgaactttctcctact

SEQ ID NO: 10668 - DNA, 20 bp, Artificial Sequence
  Description of Artificial Sequence: Synthetic oligonucleotide
ctctgaactttctcctactt

SEQ ID NO: 10669 - DNA, 20 bp, Artificial Sequence
  Description of Artificial Sequence: Synthetic oligonucleotide
tctgaactttctcctacttg

SEQ ID NO: 10670 - DNA, 20 bp, Artificial Sequence
  Description of Artificial Sequence: Synthetic oligonucleotide
ctgaactttctcctacttgg

SEQ ID NO: 10671 - DNA, 20 bp, Artificial Sequence
  Description of Artificial Sequence: Synthetic oligonucleotide
tgaactttctcctacttggc

SEQ ID NO: 10672 - DNA, 20 bp, Artificial Sequence
  Description of Artificial Sequence: Synthetic oligonucleotide
gaactttctcctacttggcg

SEQ ID NO: 10673 - DNA, 20 bp, Artificial Sequence
  Description of Artificial Sequence: Synthetic oligonucleotide
aactttctcctacttggcgg

SEQ ID NO: 10674 - DNA, 20 bp, Artificial Sequence
  Description of Artificial Sequence: Synthetic oligonucleotide
actttctcctacttggcggg

SEQ ID NO: 10675 - DNA, 20 bp, Artificial Sequence
  Description of Artificial Sequence: Synthetic oligonucleotide
ctttctcctacttggcgggc

SEQ ID NO: 10676 - DNA, 20 bp, Artificial Sequence
  Description of Artificial Sequence: Synthetic oligonucleotide
tttctcctacttggcgggcc

SEQ ID NO: 10677 - DNA, 20 bp, Artificial Sequence
  Description of Artificial Sequence: Synthetic oligonucleotide
ttctcctacttggcgggcct

SEQ ID NO: 10678 - DNA, 20 bp, Artificial Sequence
  Description of Artificial Sequence: Synthetic oligonucleotide
tctcctacttggcgggcctg

SEQ ID NO: 10679 - DNA, 20 bp, Artificial Sequence
  Description of Artificial Sequence: Synthetic oligonucleotide
ctcctacttggcgggcctga

SEQ ID NO: 10680 - DNA, 20 bp, Artificial Sequence
  Description of Artificial Sequence: Synthetic oligonucleotide
tcctacttggcgggcctgag

SEQ ID NO: 10681 - DNA, 20 bp, Artificial Sequence
  Description of Artificial Sequence: Synthetic oligonucleotide
cctacttggcgggcctgagc

SEQ ID NO: 10682 - DNA, 20 bp, Artificial Sequence
  Description of Artificial Sequence: Synthetic oligonucleotide
ctacttggcgggcctgagcc

SEQ ID NO: 10683 - DNA, 20 bp, Artificial Sequence
  Description of Artificial Sequence: Synthetic oligonucleotide
tacttggcgggcctgagcca

SEQ ID NO: 10684 - DNA, 20 bp, Artificial Sequence
  Description of Artificial Sequence: Synthetic oligonucleotide
acttggcgggcctgagccaa

SEQ ID NO: 10685 - DNA, 20 bp, Artificial Sequence
  Description of Artificial Sequence: Synthetic oligonucleotide
cttggcgggcctgagccaag

SEQ ID NO: 10686 - DNA, 20 bp, Artificial Sequence
  Description of Artificial Sequence: Synthetic oligonucleotide
ttggcgggcctgagccaaga

SEQ ID NO: 10687 - DNA, 20 bp, Artificial Sequence
  Description of Artificial Sequence: Synthetic oligonucleotide
tggcgggcctgagccaagag

SEQ ID NO: 10688 - DNA, 20 bp, Artificial Sequence
  Description of Artificial Sequence: Synthetic oligonucleotide
ggcgggcctgagccaagagt

SEQ ID NO: 10689 - DNA, 20 bp, Artificial Sequence
  Description of Artificial Sequence: Synthetic oligonucleotide
gcgggcctgagccaagagtc

SEQ ID NO: 10690 - DNA, 20 bp, Artificial Sequence
  Description of Artificial Sequence: Synthetic oligonucleotide
cgggcctgagccaagagtct

SEQ ID NO: 10691 - DNA, 20 bp, Artificial Sequence
  Description of Artificial Sequence: Synthetic oligonucleotide
gggcctgagccaagagtctg

SEQ ID NO: 10692 - DNA, 20 bp, Artificial Sequence
  Description of Artificial Sequence: Synthetic oligonucleotide
ggcctgagccaagagtctgg

SEQ ID NO: 10693 - DNA, 20 bp, Artificial Sequence
  Description of Artificial Sequence: Synthetic oligonucleotide
gcctgagccaagagtctggg

SEQ ID NO: 10694 - DNA, 20 bp, Artificial Sequence
  Description of Artificial Sequence: Synthetic oligonucleotide
cctgagccaagagtctggga

SEQ ID NO: 10695 - DNA, 20 bp, Artificial Sequence
  Description of Artificial Sequence: Synthetic oligonucleotide
ctgagccaagagtctgggag

SEQ ID NO: 10696 - DNA, 20 bp, Artificial Sequence
  Description of Artificial Sequence: Synthetic oligonucleotide
tgagccaagagtctgggagt

SEQ ID NO: 10697 - DNA, 20 bp, Artificial Sequence
  Description of Artificial Sequence: Synthetic oligonucleotide
gagccaagagtctgggagtc

SEQ ID NO: 10698 - DNA, 20 bp, Artificial Sequence
  Description of Artificial Sequence: Synthetic oligonucleotide
agccaagagtctgggagtcc

SEQ ID NO: 10699 - DNA, 20 bp, Artificial Sequence
  Description of Artificial Sequence: Synthetic oligonucleotide
gccaagagtctgggagtccc

SEQ ID NO: 10700 - DNA, 20 bp, Artificial Sequence
  Description of Artificial Sequence: Synthetic oligonucleotide
ccaagagtctgggagtcccg

SEQ ID NO: 10701 - DNA, 20 bp, Artificial Sequence
  Description of Artificial Sequence: Synthetic oligonucleotide
caagagtctgggagtcccga

SEQ ID NO: 10702 - DNA, 20 bp, Artificial Sequence
  Description of Artificial Sequence: Synthetic oligonucleotide
aagagtctgggagtcccgaa

SEQ ID NO: 10703 - DNA, 20 bp, Artificial Sequence
  Description of Artificial Sequence: Synthetic oligonucleotide
agagtctgggagtcccgaac

SEQ ID NO: 10704 - DNA, 20 bp, Artificial Sequence
  Description of Artificial Sequence: Synthetic oligonucleotide
gagtctgggagtcccgaacc

SEQ ID NO: 10705 - DNA, 20 bp, Artificial Sequence
  Description of Artificial Sequence: Synthetic oligonucleotide
agtctgggagtcccgaaccc

SEQ ID NO: 10706 - DNA, 20 bp, Artificial Sequence
  Description of Artificial Sequence: Synthetic oligonucleotide
gtctgggagtcccgaaccca

SEQ ID NO: 10707 - DNA, 20 bp, Artificial Sequence
  Description of Artificial Sequence: Synthetic oligonucleotide
tctgggagtcccgaacccac

SEQ ID NO: 10708 - DNA, 20 bp, Artificial Sequence
  Description of Artificial Sequence: Synthetic oligonucleotide
ctgggagtcccgaacccaca

SEQ ID NO: 10709 - DNA, 20 bp, Artificial Sequence
  Description of Artificial Sequence: Synthetic oligonucleotide
tgggagtcccgaacccacag

SEQ ID NO: 10710 - DNA, 20 bp, Artificial Sequence
  Description of Artificial Sequence: Synthetic oligonucleotide
gggagtcccgaacccacaga

SEQ ID NO: 10711 - DNA, 20 bp, Artificial Sequence
  Description of Artificial Sequence: Synthetic oligonucleotide
ggagtcccgaacccacagaa

SEQ ID NO: 10712 - DNA, 20 bp, Artificial Sequence
  Description of Artificial Sequence: Synthetic oligonucleotide
gagtcccgaacccacagaac

SEQ ID NO: 10713 - DNA, 20 bp, Artificial Sequence
  Description of Artificial Sequence: Synthetic oligonucleotide
agtcccgaacccacagaacc

SEQ ID NO: 10714 - DNA, 20 bp, Artificial Sequence
  Description of Artificial Sequence: Synthetic oligonucleotide
gtcccgaacccacagaaccc

SEQ ID NO: 10715 - DNA, 20 bp, Artificial Sequence
  Description of Artificial Sequence: Synthetic oligonucleotide
tcccgaacccacagaacccc

SEQ ID NO: 10716 - DNA, 20 bp, Artificial Sequence
  Description of Artificial Sequence: Synthetic oligonucleotide
cccgaacccacagaacccct

SEQ ID NO: 10717 - DNA, 20 bp, Artificial Sequence
  Description of Artificial Sequence: Synthetic oligonucleotide
ccgaacccacagaacccctg

SEQ ID NO: 10718 - DNA, 20 bp, Artificial Sequence
  Description of Artificial Sequence: Synthetic oligonucleotide
cgaacccacagaacccctgc

SEQ ID NO: 10719 - DNA, 20 bp, Artificial Sequence
  Description of Artificial Sequence: Synthetic oligonucleotide
gaacccacagaacccctgcc

SEQ ID NO: 10720 - DNA, 20 bp, Artificial Sequence
  Description of Artificial Sequence: Synthetic oligonucleotide
aacccacagaacccctgccc

SEQ ID NO: 10721 - DNA, 20 bp, Artificial Sequence
  Description of Artificial Sequence: Synthetic oligonucleotide
acccacagaacccctgcccc

SEQ ID NO: 10722 - DNA, 20 bp, Artificial Sequence
  Description of Artificial Sequence: Synthetic oligonucleotide
cccacagaacccctgccccc

SEQ ID NO: 10723 - DNA, 20 bp, Artificial Sequence
  Description of Artificial Sequence: Synthetic oligonucleotide
ccacagaacccctgccccct

SEQ ID NO: 10724 - DNA, 20 bp, Artificial Sequence
  Description of Artificial Sequence: Synthetic oligonucleotide
cacagaacccctgccccctt

SEQ ID NO: 10725 - DNA, 20 bp, Artificial Sequence
  Description of Artificial Sequence: Synthetic oligonucleotide
acagaacccctgcccccttc

SEQ ID NO: 10726 - DNA, 20 bp, Artificial Sequence
  Description of Artificial Sequence: Synthetic oligonucleotide
cagaacccctgcccccttcc

SEQ ID NO: 10727 - DNA, 20 bp, Artificial Sequence
  Description of Artificial Sequence: Synthetic oligonucleotide
agaacccctgcccccttcca

SEQ ID NO: 10728 - DNA, 20 bp, Artificial Sequence
  Description of Artificial Sequence: Synthetic oligonucleotide
gaacccctgcccccttccac

SEQ ID NO: 10729 - DNA, 20 bp, Artificial Sequence
  Description of Artificial Sequence: Synthetic oligonucleotide
aacccctgcccccttccacc

SEQ ID NO: 10730 - DNA, 20 bp, Artificial Sequence
  Description of Artificial Sequence: Synthetic oligonucleotide
acccctgcccccttccaccg

SEQ ID NO: 10731 - DNA, 20 bp, Artificial Sequence
  Description of Artificial Sequence: Synthetic oligonucleotide
cccctgcccccttccaccgc

SEQ ID NO: 10732 - DNA, 20 bp, Artificial Sequence
  Description of Artificial Sequence: Synthetic oligonucleotide
ccctgcccccttccaccgca

SEQ ID NO: 10733 - DNA, 20 bp, Artificial Sequence
  Description of Artificial Sequence: Synthetic oligonucleotide
cctgcccccttccaccgcat

SEQ ID NO: 10734 - DNA, 20 bp, Artificial Sequence
  Description of Artificial Sequence: Synthetic oligonucleotide
ctgcccccttccaccgcatt

SEQ ID NO: 10735 - DNA, 20 bp, Artificial Sequence
  Description of Artificial Sequence: Synthetic oligonucleotide
tgcccccttccaccgcattt

SEQ ID NO: 10736 - DNA, 20 bp, Artificial Sequence
  Description of Artificial Sequence: Synthetic oligonucleotide
gcccccttccaccgcatttc

SEQ ID NO: 10737 - DNA, 20 bp, Artificial Sequence
  Description of Artificial Sequence: Synthetic oligonucleotide
cccccttccaccgcatttcc

SEQ ID NO: 10738 - DNA, 20 bp, Artificial Sequence
  Description of Artificial Sequence: Synthetic oligonucleotide
ccccttccaccgcatttccc

SEQ ID NO: 10739 - DNA, 20 bp, Artificial Sequence
  Description of Artificial Sequence: Synthetic oligonucleotide
cccttccaccgcatttccca

SEQ ID NO: 10740 - DNA, 20 bp, Artificial Sequence
  Description of Artificial Sequence: Synthetic oligonucleotide
ccttccaccgcatttcccag

SEQ ID NO: 10741 - DNA, 20 bp, Artificial Sequence
  Description of Artificial Sequence: Synthetic oligonucleotide
cttccaccgcatttcccagc

SEQ ID NO: 10742 - DNA, 20 bp, Artificial Sequence
  Description of Artificial Sequence: Synthetic oligonucleotide
ttccaccgcatttcccagcc

SEQ ID NO: 10743 - DNA, 20 bp, Artificial Sequence
  Description of Artificial Sequence: Synthetic oligonucleotide
tccaccgcatttcccagcca

SEQ ID NO: 10744 - DNA, 20 bp, Artificial Sequence
  Description of Artificial Sequence: Synthetic oligonucleotide
ccaccgcatttcccagccag

SEQ ID NO: 10745 - DNA, 20 bp, Artificial Sequence
  Description of Artificial Sequence: Synthetic oligonucleotide
caccgcatttcccagccagg

SEQ ID NO: 10746 - DNA, 20 bp, Artificial Sequence
  Description of Artificial Sequence: Synthetic oligonucleotide
accgcatttcccagccagga

SEQ ID NO: 10747 - DNA, 20 bp, Artificial Sequence
  Description of Artificial Sequence: Synthetic oligonucleotide
ccgcatttcccagccaggac

SEQ ID NO: 10748 - DNA, 20 bp, Artificial Sequence
  Description of Artificial Sequence: Synthetic oligonucleotide
cgcatttcccagccaggact

SEQ ID NO: 10749 - DNA, 20 bp, Artificial Sequence
  Description of Artificial Sequence: Synthetic oligonucleotide
gcatttcccagccaggactt

SEQ ID NO: 10750 - DNA, 20 bp, Artificial Sequence
  Description of Artificial Sequence: Synthetic oligonucleotide
catttcccagccaggacttg

SEQ ID NO: 10751 - DNA, 20 bp, Artificial Sequence
  Description of Artificial Sequence: Synthetic oligonucleotide
atttcccagccaggacttgt

SEQ ID NO: 10752 - DNA, 20 bp, Artificial Sequence
  Description of Artificial Sequence: Synthetic oligonucleotide
tttcccagccaggacttgtg

SEQ ID NO: 10753 - DNA, 20 bp, Artificial Sequence
  Description of Artificial Sequence: Synthetic oligonucleotide
ttcccagccaggacttgtgc

SEQ ID NO: 10754 - DNA, 20 bp, Artificial Sequence
  Description of Artificial Sequence: Synthetic oligonucleotide
tcccagccaggacttgtgcc

SEQ ID NO: 10755 - DNA, 20 bp, Artificial Sequence
  Description of Artificial Sequence: Synthetic oligonucleotide
cccagccaggacttgtgcct

SEQ ID NO: 10756 - DNA, 20 bp, Artificial Sequence
  Description of Artificial Sequence: Synthetic oligonucleotide
ccagccaggacttgtgcctt

SEQ ID NO: 10757 - DNA, 20 bp, Artificial Sequence
  Description of Artificial Sequence: Synthetic oligonucleotide
cagccaggacttgtgccttc

SEQ ID NO: 10758 - DNA, 20 bp, Artificial Sequence
  Description of Artificial Sequence: Synthetic oligonucleotide
agccaggacttgtgccttcc

SEQ ID NO: 10759 - DNA, 20 bp, Artificial Sequence
  Description of Artificial Sequence: Synthetic oligonucleotide
gccaggacttgtgccttccc

SEQ ID NO: 10760 - DNA, 20 bp, Artificial Sequence
  Description of Artificial Sequence: Synthetic oligonucleotide
ccaggacttgtgccttcccc

SEQ ID NO: 10761 - DNA, 20 bp, Artificial Sequence
  Description of Artificial Sequence: Synthetic oligonucleotide
caggacttgtgccttccccc

SEQ ID NO: 10762 - DNA, 20 bp, Artificial Sequence
  Description of Artificial Sequence: Synthetic oligonucleotide
aggacttgtgccttcccccg

SEQ ID NO: 10763 - DNA, 20 bp, Artificial Sequence
  Description of Artificial Sequence: Synthetic oligonucleotide
ggacttgtgccttcccccgt

SEQ ID NO: 10764 - DNA, 20 bp, Artificial Sequence
  Description of Artificial Sequence: Synthetic oligonucleotide
gacttgtgccttcccccgtc

SEQ ID NO: 10765 - DNA, 20 bp, Artificial Sequence
  Description of Artificial Sequence: Synthetic oligonucleotide
acttgtgccttcccccgtca

SEQ ID NO: 10766 - DNA, 20 bp, Artificial Sequence
  Description of Artificial Sequence: Synthetic oligonucleotide
cttgtgccttcccccgtcac

SEQ ID NO: 10767 - DNA, 20 bp, Artificial Sequence
  Description of Artificial Sequence: Synthetic oligonucleotide
ttgtgccttcccccgtcacc

SEQ ID NO: 10768 - DNA, 20 bp, Artificial Sequence
  Description of Artificial Sequence: Synthetic oligonucleotide
tgtgccttcccccgtcaccc

SEQ ID NO: 10769 - DNA, 20 bp, Artificial Sequence
  Description of Artificial Sequence: Synthetic oligonucleotide
gtgccttcccccgtcaccct

SEQ ID NO: 10770 - DNA, 20 bp, Artificial Sequence
  Description of Artificial Sequence: Synthetic oligonucleotide
tgccttcccccgtcaccctc

SEQ ID NO: 10771 - DNA, 20 bp, Artificial Sequence
  Description of Artificial Sequence: Synthetic oligonucleotide
gccttcccccgtcaccctcc

SEQ ID NO: 10772 - DNA, 20 bp, Artificial Sequence
  Description of Artificial Sequence: Synthetic oligonucleotide
ccttcccccgtcaccctcca

SEQ ID NO: 10773 - DNA, 20 bp, Artificial Sequence
  Description of Artificial Sequence: Synthetic oligonucleotide
cttcccccgtcaccctccag

SEQ ID NO: 10774 - DNA, 20 bp, Artificial Sequence
  Description of Artificial Sequence: Synthetic oligonucleotide
ttcccccgtcaccctccaga

SEQ ID NO: 10775 - DNA, 20 bp, Artificial Sequence
  Description of Artificial Sequence: Synthetic oligonucleotide
tcccccgtcaccctccagaa

SEQ ID NO: 10776 - DNA, 20 bp, Artificial Sequence
  Description of Artificial Sequence: Synthetic oligonucleotide
cccccgtcaccctccagaag

SEQ ID NO: 10777 - DNA, 20 bp, Artificial Sequence
  Description of Artificial Sequence: Synthetic oligonucleotide
ccccgtcaccctccagaagc

SEQ ID NO: 10778 - DNA, 20 bp, Artificial Sequence
  Description of Artificial Sequence: Synthetic oligonucleotide
cccgtcaccctccagaagcc

SEQ ID NO: 10779 - DNA, 20 bp, Artificial Sequence
  Description of Artificial Sequence: Synthetic oligonucleotide
ccgtcaccctccagaagccc

SEQ ID NO: 10780 - DNA, 20 bp, Artificial Sequence
  Description of Artificial Sequence: Synthetic oligonucleotide
cgtcaccctccagaagcccc

SEQ ID NO: 10781 - DNA, 20 bp, Artificial Sequence
  Description of Artificial Sequence: Synthetic oligonucleotide
gtcaccctccagaagcccct

SEQ ID NO: 10782 - DNA, 20 bp, Artificial Sequence
  Description of Artificial Sequence: Synthetic oligonucleotide
tcaccctccagaagcccctc

SEQ ID NO: 10783 - DNA, 20 bp, Artificial Sequence
  Description of Artificial Sequence: Synthetic oligonucleotide
caccctccagaagcccctca

SEQ ID NO: 10784 - DNA, 20 bp, Artificial Sequence
  Description of Artificial Sequence: Synthetic oligonucleotide
accctccagaagcccctcat

SEQ ID NO: 10785 - DNA, 20 bp, Artificial Sequence
  Description of Artificial Sequence: Synthetic oligonucleotide
ccctccagaagcccctcatc

SEQ ID NO: 10786 - DNA, 20 bp, Artificial Sequence
  Description of Artificial Sequence: Synthetic oligonucleotide
cctccagaagcccctcatcc

SEQ ID NO: 10787 - DNA, 20 bp, Artificial Sequence
  Description of Artificial Sequence: Synthetic oligonucleotide
ctccagaagcccctcatcct

SEQ ID NO: 10788 - DNA, 20 bp, Artificial Sequence
  Description of Artificial Sequence: Synthetic oligonucleotide
tccagaagcccctcatcctg

SEQ ID NO: 10789 - DNA, 20 bp, Artificial Sequence
  Description of Artificial Sequence: Synthetic oligonucleotide
ccagaagcccctcatcctgg

SEQ ID NO: 10790 - DNA, 20 bp, Artificial Sequence
  Description of Artificial Sequence: Synthetic oligonucleotide
cagaagcccctcatcctggg

SEQ ID NO: 10791 - DNA, 20 bp, Artificial Sequence
  Description of Artificial Sequence: Synthetic oligonucleotide
agaagcccctcatcctggga

SEQ ID NO: 10792 - DNA, 20 bp, Artificial Sequence
  Description of Artificial Sequence: Synthetic oligonucleotide
gaagcccctcatcctgggat

SEQ ID NO: 10793 - DNA, 20 bp, Artificial Sequence
  Description of Artificial Sequence: Synthetic oligonucleotide
aagcccctcatcctgggatg

SEQ ID NO: 10794 - DNA, 20 bp, Artificial Sequence
  Description of Artificial Sequence: Synthetic oligonucleotide
agcccctcatcctgggatgg

SEQ ID NO: 10795 - DNA, 20 bp, Artificial Sequence
  Description of Artificial Sequence: Synthetic oligonucleotide
gcccctcatcctgggatggt

SEQ ID NO: 10796 - DNA, 20 bp, Artificial Sequence
  Description of Artificial Sequence: Synthetic oligonucleotide
cccctcatcctgggatggtg

SEQ ID NO: 10797 - DNA, 20 bp, Artificial Sequence
  Description of Artificial Sequence: Synthetic oligonucleotide
ccctcatcctgggatggtgg

SEQ ID NO: 10798 - DNA, 20 bp, Artificial Sequence
  Description of Artificial Sequence: Synthetic oligonucleotide
cctcatcctgggatggtggc

SEQ ID NO: 10799 - DNA, 20 bp, Artificial Sequence
  Description of Artificial Sequence: Synthetic oligonucleotide
ctcatcctgggatggtggct

SEQ ID NO: 10800 - DNA, 20 bp, Artificial Sequence
  Description of Artificial Sequence: Synthetic oligonucleotide
tcatcctgggatggtggctt

SEQ ID NO: 10801 - DNA, 20 bp, Artificial Sequence
  Description of Artificial Sequence: Synthetic oligonucleotide
catcctgggatggtggcttt

SEQ ID NO: 10802 - DNA, 20 bp, Artificial Sequence
  Description of Artificial Sequence: Synthetic oligonucleotide
atcctgggatggtggctttg

SEQ ID NO: 10803 - DNA, 20 bp, Artificial Sequence
  Description of Artificial Sequence: Synthetic oligonucleotide
tcctgggatggtggctttgg

SEQ ID NO: 10804 - DNA, 20 bp, Artificial Sequence
  Description of Artificial Sequence: Synthetic oligonucleotide
cctgggatggtggctttggg

SEQ ID NO: 10805 - DNA, 20 bp, Artificial Sequence
  Description of Artificial Sequence: Synthetic oligonucleotide
ctgggatggtggctttggga

SEQ ID NO: 10806 - DNA, 20 bp, Artificial Sequence
  Description of Artificial Sequence: Synthetic oligonucleotide
tgggatggtggctttgggag

SEQ ID NO: 10807 - DNA, 20 bp, Artificial Sequence
  Description of Artificial Sequence: Synthetic oligonucleotide
gggatggtggctttgggagg

SEQ ID NO: 10808 - DNA, 20 bp, Artificial Sequence
  Description of Artificial Sequence: Synthetic oligonucleotide
ggatggtggctttgggaggg

SEQ ID NO: 10809 - DNA, 20 bp, Artificial Sequence
  Description of Artificial Sequence: Synthetic oligonucleotide
gatggtggctttgggagggt

SEQ ID NO: 10810 - DNA, 20 bp, Artificial Sequence
  Description of Artificial Sequence: Synthetic oligonucleotide
atggtggctttgggagggtg

SEQ ID NO: 10811 - DNA, 20 bp, Artificial Sequence
  Description of Artificial Sequence: Synthetic oligonucleotide
tggtggctttgggagggtgg

SEQ ID NO: 10812 - DNA, 20 bp, Artificial Sequence
  Description of Artificial Sequence: Synthetic oligonucleotide
ggtggctttgggagggtgga

SEQ ID NO: 10813 - DNA, 20 bp, Artificial Sequence
  Description of Artificial Sequence: Synthetic oligonucleotide
gtggctttgggagggtggac

SEQ ID NO: 10814 - DNA, 20 bp, Artificial Sequence
  Description of Artificial Sequence: Synthetic oligonucleotide
tggctttgggagggtggaca

SEQ ID NO: 10815 - DNA, 20 bp, Artificial Sequence
  Description of Artificial Sequence: Synthetic oligonucleotide
ggctttgggagggtggacag

SEQ ID NO: 10816 - DNA, 20 bp, Artificial Sequence
  Description of Artificial Sequence: Synthetic oligonucleotide
gctttgggagggtggacagg

SEQ ID NO: 10817 - DNA, 20 bp, Artificial Sequence
  Description of Artificial Sequence: Synthetic oligonucleotide
ctttgggagggtggacagga

SEQ ID NO: 10818 - DNA, 20 bp, Artificial Sequence
  Description of Artificial Sequence: Synthetic oligonucleotide
tttgggagggtggacaggac

SEQ ID NO: 10819 - DNA, 20 bp, Artificial Sequence
  Description of Artificial Sequence: Synthetic oligonucleotide
ttgggagggtggacaggacc

SEQ ID NO: 10820 - DNA, 20 bp, Artificial Sequence
  Description of Artificial Sequence: Synthetic oligonucleotide
tgggagggtggacaggaccc

SEQ ID NO: 10821 - DNA, 20 bp, Artificial Sequence
  Description of Artificial Sequence: Synthetic oligonucleotide
gggagggtggacaggaccct

SEQ ID NO: 10822 - DNA, 20 bp, Artificial Sequence
  Description of Artificial Sequence: Synthetic oligonucleotide
ggagggtggacaggaccctg

SEQ ID NO: 10823 - DNA, 20 bp, Artificial Sequence
  Description of Artificial Sequence: Synthetic oligonucleotide
gagggtggacaggaccctga

SEQ ID NO: 10824 - DNA, 20 bp, Artificial Sequence
  Description of Artificial Sequence: Synthetic oligonucleotide
agggtggacaggaccctgac

SEQ ID NO: 10825 - DNA, 20 bp, Artificial Sequence
  Description of Artificial Sequence: Synthetic oligonucleotide
gggtggacaggaccctgacc

SEQ ID NO: 10826 - DNA, 20 bp, Artificial Sequence
  Description of Artificial Sequence: Synthetic oligonucleotide
ggtggacaggaccctgacca

SEQ ID NO: 10827 - DNA, 20 bp, Artificial Sequence
  Description of Artificial Sequence: Synthetic oligonucleotide
gtggacaggaccctgaccac

SEQ ID NO: 10828 - DNA, 20 bp, Artificial Sequence
  Description of Artificial Sequence: Synthetic oligonucleotide
tggacaggaccctgaccacg

SEQ ID NO: 10829 - DNA, 20 bp, Artificial Sequence
  Description of Artificial Sequence: Synthetic oligonucleotide
ggacaggaccctgaccacgc

SEQ ID NO: 10830 - DNA, 20 bp, Artificial Sequence
  Description of Artificial Sequence: Synthetic oligonucleotide
gacaggaccctgaccacgct

SEQ ID NO: 10831 - DNA, 20 bp, Artificial Sequence
  Description of Artificial Sequence: Synthetic oligonucleotide
acaggaccctgaccacgctg

SEQ ID NO: 10832 - DNA, 20 bp, Artificial Sequence
  Description of Artificial Sequence: Synthetic oligonucleotide
caggaccctgaccacgctga

SEQ ID NO: 10833 - DNA, 20 bp, Artificial Sequence
  Description of Artificial Sequence: Synthetic oligonucleotide
aggaccctgaccacgctgag

SEQ ID NO: 10834 - DNA, 20 bp, Artificial Sequence
  Description of Artificial Sequence: Synthetic oligonucleotide
ggaccctgaccacgctgaga

SEQ ID NO: 10835 - DNA, 20 bp, Artificial Sequence
  Description of Artificial Sequence: Synthetic oligonucleotide
gaccctgaccacgctgagat

SEQ ID NO: 10836 - DNA, 20 bp, Artificial Sequence
  Description of Artificial Sequence: Synthetic oligonucleotide
accctgaccacgctgagatg

SEQ ID NO: 10837 - DNA, 20 bp, Artificial Sequence
  Description of Artificial Sequence: Synthetic oligonucleotide
ccctgaccacgctgagatgc

SEQ ID NO: 10838 - DNA, 20 bp, Artificial Sequence
  Description of Artificial Sequence: Synthetic oligonucleotide
cctgaccacgctgagatgct

SEQ ID NO: 10839 - DNA, 20 bp, Artificial Sequence
  Description of Artificial Sequence: Synthetic oligonucleotide
ctgaccacgctgagatgcta

SEQ ID NO: 10840 - DNA, 20 bp, Artificial Sequence
  Description of Artificial Sequence: Synthetic oligonucleotide
tgaccacgctgagatgctag

SEQ ID NO: 10841 - DNA, 20 bp, Artificial Sequence
  Description of Artificial Sequence: Synthetic oligonucleotide
gaccacgctgagatgctagc

SEQ ID NO: 10842 - DNA, 20 bp, Artificial Sequence
  Description of Artificial Sequence: Synthetic oligonucleotide
accacgctgagatgctagcc

SEQ ID NO: 10843 - DNA, 20 bp, Artificial Sequence
  Description of Artificial Sequence: Synthetic oligonucleotide
ccacgctgagatgctagcct

SEQ ID NO: 10844 - DNA, 20 bp, Artificial Sequence
  Description of Artificial Sequence: Synthetic oligonucleotide
cacgctgagatgctagcctg

SEQ ID NO: 10845 - DNA, 20 bp, Artificial Sequence
  Description of Artificial Sequence: Synthetic oligonucleotide
acgctgagatgctagcctgg

SEQ ID NO: 10846 - DNA, 20 bp, Artificial Sequence
  Description of Artificial Sequence: Synthetic oligonucleotide
cgctgagatgctagcctggc

SEQ ID NO: 10847 - DNA, 20 bp, Artificial Sequence
  Description of Artificial Sequence: Synthetic oligonucleotide
gctgagatgctagcctggcg

SEQ ID NO: 10848 - DNA, 20 bp, Artificial Sequence
  Description of Artificial Sequence: Synthetic oligonucleotide
ctgagatgctagcctggcgg

SEQ ID NO: 10849 - DNA, 20 bp, Artificial Sequence
  Description of Artificial Sequence: Synthetic oligonucleotide
tgagatgctagcctggcggg

SEQ ID NO: 10850 - DNA, 20 bp, Artificial Sequence
  Description of Artificial Sequence: Synthetic oligonucleotide
gagatgctagcctggcgggg

SEQ ID NO: 10851 - DNA, 20 bp, Artificial Sequence
  Description of Artificial Sequence: Synthetic oligonucleotide
agatgctagcctggcggggt

SEQ ID NO: 10852 - DNA, 20 bp, Artificial Sequence
  Description of Artificial Sequence: Synthetic oligonucleotide
gatgctagcctggcggggtt

SEQ ID NO: 10853 - DNA, 20 bp, Artificial Sequence
  Description of Artificial Sequence: Synthetic oligonucleotide
atgctagcctggcggggttg

SEQ ID NO: 10854 - DNA, 20 bp, Artificial Sequence
  Description of Artificial Sequence: Synthetic oligonucleotide
tgctagcctggcggggttgg

SEQ ID NO: 10855 - DNA, 20 bp, Artificial Sequence
  Description of Artificial Sequence: Synthetic oligonucleotide
gctagcctggcggggttggg

SEQ ID NO: 10856 - DNA, 20 bp, Artificial Sequence
  Description of Artificial Sequence: Synthetic oligonucleotide
ctagcctggcggggttgggg

SEQ ID NO: 10857 - DNA, 20 bp, Artificial Sequence
  Description of Artificial Sequence: Synthetic oligonucleotide
tagcctggcggggttggggg

SEQ ID NO: 10858 - DNA, 20 bp, Artificial Sequence
  Description of Artificial Sequence: Synthetic oligonucleotide
agcctggcggggttgggggc

SEQ ID NO: 10859 - DNA, 20 bp, Artificial Sequence
  Description of Artificial Sequence: Synthetic oligonucleotide
gcctggcggggttgggggcg

SEQ ID NO: 10860 - DNA, 20 bp, Artificial Sequence
  Description of Artificial Sequence: Synthetic oligonucleotide
cctggcggggttgggggcgg

SEQ ID NO: 10861 - DNA, 20 bp, Artificial Sequence
  Description of Artificial Sequence: Synthetic oligonucleotide
ctggcggggttgggggcggg

SEQ ID NO: 10862 - DNA, 20 bp, Artificial Sequence
  Description of Artificial Sequence: Synthetic oligonucleotide
tggcggggttgggggcgggc

SEQ ID NO: 10863 - DNA, 20 bp, Artificial Sequence
  Description of Artificial Sequence: Synthetic oligonucleotide
ggcggggttgggggcgggca

SEQ ID NO: 10864 - DNA, 20 bp, Artificial Sequence
  Description of Artificial Sequence: Synthetic oligonucleotide
gcggggttgggggcgggcag

SEQ ID NO: 10865 - DNA, 20 bp, Artificial Sequence
  Description of Artificial Sequence: Synthetic oligonucleotide
cggggttgggggcgggcagc

SEQ ID NO: 10866 - DNA, 20 bp, Artificial Sequence
  Description of Artificial Sequence: Synthetic oligonucleotide
ggggttgggggcgggcagca

SEQ ID NO: 10867 - DNA, 20 bp, Artificial Sequence
  Description of Artificial Sequence: Synthetic oligonucleotide
gggttgggggcgggcagcac

SEQ ID NO: 10868 - DNA, 20 bp, Artificial Sequence
  Description of Artificial Sequence: Synthetic oligonucleotide
ggttgggggcgggcagcacg

SEQ ID NO: 10869 - DNA, 20 bp, Artificial Sequence
  Description of Artificial Sequence: Synthetic oligonucleotide
gttgggggcgggcagcacgg

SEQ ID NO: 10870 - DNA, 20 bp, Artificial Sequence
  Description of Artificial Sequence: Synthetic oligonucleotide
ttgggggcgggcagcacgga

SEQ ID NO: 10871 - DNA, 20 bp, Artificial Sequence
  Description of Artificial Sequence: Synthetic oligonucleotide
tgggggcgggcagcacggag

SEQ ID NO: 10872 - DNA, 20 bp, Artificial Sequence
  Description of Artificial Sequence: Synthetic oligonucleotide
gggggcgggcagcacggagg

SEQ ID NO: 10873 - DNA, 20 bp, Artificial Sequence
  Description of Artificial Sequence: Synthetic oligonucleotide
ggggcgggcagcacggaggt

SEQ ID NO: 10874 - DNA, 20 bp, Artificial Sequence
  Description of Artificial Sequence: Synthetic oligonucleotide
gggcgggcagcacggaggtg

SEQ ID NO: 10875 - DNA, 20 bp, Artificial Sequence
  Description of Artificial Sequence: Synthetic oligonucleotide
ggcgggcagcacggaggtgg

SEQ ID NO: 10876 - DNA, 20 bp, Artificial Sequence
  Description of Artificial Sequence: Synthetic oligonucleotide
gcgggcagcacggaggtggg

SEQ ID NO: 10877 - DNA, 20 bp, Artificial Sequence
  Description of Artificial Sequence: Synthetic oligonucleotide
cgggcagcacggaggtggga

SEQ ID NO: 10878 - DNA, 20 bp, Artificial Sequence
  Description of Artificial Sequence: Synthetic oligonucleotide
gggcagcacggaggtgggaa

SEQ ID NO: 10879 - DNA, 20 bp, Artificial Sequence
  Description of Artificial Sequence: Synthetic oligonucleotide
ggcagcacggaggtgggaag

SEQ ID NO: 10880 - DNA, 20 bp, Artificial Sequence
  Description of Artificial Sequence: Synthetic oligonucleotide
gcagcacggaggtgggaagg

SEQ ID NO: 10881 - DNA, 20 bp, Artificial Sequence
  Description of Artificial Sequence: Synthetic oligonucleotide
cagcacggaggtgggaagga

SEQ ID NO: 10882 - DNA, 20 bp, Artificial Sequence
  Description of Artificial Sequence: Synthetic oligonucleotide
agcacggaggtgggaaggag

SEQ ID NO: 10883 - DNA, 20 bp, Artificial Sequence
  Description of Artificial Sequence: Synthetic oligonucleotide
gcacggaggtgggaaggagc

SEQ ID NO: 10884 - DNA, 20 bp, Artificial Sequence
  Description of Artificial Sequence: Synthetic oligonucleotide
cacggaggtgggaaggagcg

SEQ ID NO: 10885 - DNA, 20 bp, Artificial Sequence
  Description of Artificial Sequence: Synthetic oligonucleotide
acggaggtgggaaggagcgg

SEQ ID NO: 10886 - DNA, 20 bp, Artificial Sequence
  Description of Artificial Sequence: Synthetic oligonucleotide
cggaggtgggaaggagcggg

SEQ ID NO: 10887 - DNA, 20 bp, Artificial Sequence
  Description of Artificial Sequence: Synthetic oligonucleotide
ggaggtgggaaggagcggga

SEQ ID NO: 10888 - DNA, 20 bp, Artificial Sequence
  Description of Artificial Sequence: Synthetic oligonucleotide
gaggtgggaaggagcgggag

SEQ ID NO: 10889 - DNA, 20 bp, Artificial Sequence
  Description of Artificial Sequence: Synthetic oligonucleotide
aggtgggaaggagcgggagc

SEQ ID NO: 10890 - DNA, 20 bp, Artificial Sequence
  Description of Artificial Sequence: Synthetic oligonucleotide
ggtgggaaggagcgggagct

SEQ ID NO: 10891 - DNA, 20 bp, Artificial Sequence
  Description of Artificial Sequence: Synthetic oligonucleotide
gtgggaaggagcgggagctt

SEQ ID NO: 10892 - DNA, 20 bp, Artificial Sequence
  Description of Artificial Sequence: Synthetic oligonucleotide
tgggaaggagcgggagcttg

SEQ ID NO: 10893 - DNA, 20 bp, Artificial Sequence
  Description of Artificial Sequence: Synthetic oligonucleotide
gggaaggagcgggagcttgg

SEQ ID NO: 10894 - DNA, 20 bp, Artificial Sequence
  Description of Artificial Sequence: Synthetic oligonucleotide
ggaaggagcgggagcttggg

SEQ ID NO: 10895 - DNA, 20 bp, Artificial Sequence
  Description of Artificial Sequence: Synthetic oligonucleotide
gaaggagcgggagcttgggg

SEQ ID NO: 10896 - DNA, 20 bp, Artificial Sequence
  Description of Artificial Sequence: Synthetic oligonucleotide
aaggagcgggagcttgggga

SEQ ID NO: 10897 - DNA, 20 bp, Artificial Sequence
  Description of Artificial Sequence: Synthetic oligonucleotide
aggagcgggagcttggggag

SEQ ID NO: 10898 - DNA, 20 bp, Artificial Sequence
  Description of Artificial Sequence: Synthetic oligonucleotide
ggagcgggagcttggggagg

SEQ ID NO: 10899 - DNA, 20 bp, Artificial Sequence
  Description of Artificial Sequence: Synthetic oligonucleotide
gagcgggagcttggggagga

SEQ ID NO: 10900 - DNA, 20 bp, Artificial Sequence
  Description of Artificial Sequence: Synthetic oligonucleotide
agcgggagcttggggaggag

SEQ ID NO: 10901 - DNA, 20 bp, Artificial Sequence
  Description of Artificial Sequence: Synthetic oligonucleotide
gcgggagcttggggaggaga

SEQ ID NO: 10902 - DNA, 20 bp, Artificial Sequence
  Description of Artificial Sequence: Synthetic oligonucleotide
cgggagcttggggaggagag

SEQ ID NO: 10903 - DNA, 20 bp, Artificial Sequence
  Description of Artificial Sequence: Synthetic oligonucleotide
gggagcttggggaggagaga

SEQ ID NO: 10904 - DNA, 20 bp, Artificial Sequence
  Description of Artificial Sequence: Synthetic oligonucleotide
ggagcttggggaggagagaa

SEQ ID NO: 10905 - DNA, 20 bp, Artificial Sequence
  Description of Artificial Sequence: Synthetic oligonucleotide
gagcttggggaggagagaac

SEQ ID NO: 10906 - DNA, 20 bp, Artificial Sequence
  Description of Artificial Sequence: Synthetic oligonucleotide
agcttggggaggagagaacc

SEQ ID NO: 10907 - DNA, 20 bp, Artificial Sequence
  Description of Artificial Sequence: Synthetic oligonucleotide
gcttggggaggagagaaccc

SEQ ID NO: 10908 - DNA, 20 bp, Artificial Sequence
  Description of Artificial Sequence: Synthetic oligonucleotide
cttggggaggagagaaccct

SEQ ID NO: 10909 - DNA, 20 bp, Artificial Sequence
  Description of Artificial Sequence: Synthetic oligonucleotide
ttggggaggagagaaccctc

SEQ ID NO: 10910 - DNA, 20 bp, Artificial Sequence
  Description of Artificial Sequence: Synthetic oligonucleotide
tggggaggagagaaccctca

SEQ ID NO: 10911 - DNA, 20 bp, Artificial Sequence
  Description of Artificial Sequence: Synthetic oligonucleotide
ggggaggagagaaccctcag

SEQ ID NO: 10912 - DNA, 20 bp, Artificial Sequence
  Description of Artificial Sequence: Synthetic oligonucleotide
gggaggagagaaccctcagg

SEQ ID NO: 10913 - DNA, 20 bp, Artificial Sequence
  Description of Artificial Sequence: Synthetic oligonucleotide
ggaggagagaaccctcaggt

SEQ ID NO: 10914 - DNA, 20 bp, Artificial Sequence
  Description of Artificial Sequence: Synthetic oligonucleotide
gaggagagaaccctcaggtc

SEQ ID NO: 10915 - DNA, 20 bp, Artificial Sequence
  Description of Artificial Sequence: Synthetic oligonucleotide
aggagagaaccctcaggtct

SEQ ID NO: 10916 - DNA, 20 bp, Artificial Sequence
  Description of Artificial Sequence: Synthetic oligonucleotide
ggagagaaccctcaggtcta

SEQ ID NO: 10917 - DNA, 20 bp, Artificial Sequence
  Description of Artificial Sequence: Synthetic oligonucleotide
gagagaaccctcaggtctac

SEQ ID NO: 10918 - DNA, 20 bp, Artificial Sequence
  Description of Artificial Sequence: Synthetic oligonucleotide
agagaaccctcaggtctaca

SEQ ID NO: 10919 - DNA, 20 bp, Artificial Sequence
  Description of Artificial Sequence: Synthetic oligonucleotide
gagaaccctcaggtctacag

SEQ ID NO: 10920 - DNA, 20 bp, Artificial Sequence
  Description of Artificial Sequence: Synthetic oligonucleotide
agaaccctcaggtctacagt

SEQ ID NO: 10921 - DNA, 20 bp, Artificial Sequence
  Description of Artificial Sequence: Synthetic oligonucleotide
gaaccctcaggtctacagtg

SEQ ID NO: 10922 - DNA, 20 bp, Artificial Sequence
  Description of Artificial Sequence: Synthetic oligonucleotide
aaccctcaggtctacagtgc

SEQ ID NO: 10923 - DNA, 20 bp, Artificial Sequence
  Description of Artificial Sequence: Synthetic oligonucleotide
accctcaggtctacagtgct

SEQ ID NO: 10924 - DNA, 20 bp, Artificial Sequence
  Description of Artificial Sequence: Synthetic oligonucleotide
ccctcaggtctacagtgctg

SEQ ID NO: 10925 - DNA, 20 bp, Artificial Sequence
  Description of Artificial Sequence: Synthetic oligonucleotide
cctcaggtctacagtgctgg

SEQ ID NO: 10926 - DNA, 20 bp, Artificial Sequence
  Description of Artificial Sequence: Synthetic oligonucleotide
ctcaggtctacagtgctgga

SEQ ID NO: 10927 - DNA, 20 bp, Artificial Sequence
  Description of Artificial Sequence: Synthetic oligonucleotide
tcaggtctacagtgctggaa

SEQ ID NO: 10928 - DNA, 20 bp, Artificial Sequence
  Description of Artificial Sequence: Synthetic oligonucleotide
caggtctacagtgctggaag

SEQ ID NO: 10929 - DNA, 20 bp, Artificial Sequence
  Description of Artificial Sequence: Synthetic oligonucleotide
aggtctacagtgctggaagc

SEQ ID NO: 10930 - DNA, 20 bp, Artificial Sequence
  Description of Artificial Sequence: Synthetic oligonucleotide
ggtctacagtgctggaagcc

SEQ ID NO: 10931 - DNA, 20 bp, Artificial Sequence
  Description of Artificial Sequence: Synthetic oligonucleotide
gtctacagtgctggaagcct

SEQ ID NO: 10932 - DNA, 20 bp, Artificial Sequence
  Description of Artificial Sequence: Synthetic oligonucleotide
tctacagtgctggaagcctg

SEQ ID NO: 10933 - DNA, 20 bp, Artificial Sequence
  Description of Artificial Sequence: Synthetic oligonucleotide
ctacagtgctggaagcctgc

SEQ ID NO: 10934 - DNA, 20 bp, Artificial Sequence
  Description of Artificial Sequence: Synthetic oligonucleotide
tacagtgctggaagcctgcc

SEQ ID NO: 10935 - DNA, 20 bp, Artificial Sequence
  Description of Artificial Sequence: Synthetic oligonucleotide
acagtgctggaagcctgcca

SEQ ID NO: 10936 - DNA, 20 bp, Artificial Sequence
  Description of Artificial Sequence: Synthetic oligonucleotide
cagtgctggaagcctgccac

SEQ ID NO: 10937 - DNA, 20 bp, Artificial Sequence
  Description of Artificial Sequence: Synthetic oligonucleotide
agtgctggaagcctgccact

SEQ ID NO: 10938 - DNA, 20 bp, Artificial Sequence
  Description of Artificial Sequence: Synthetic oligonucleotide
gtgctggaagcctgccactg

SEQ ID NO: 10939 - DNA, 20 bp, Artificial Sequence
  Description of Artificial Sequence: Synthetic oligonucleotide
tgctggaagcctgccactga

SEQ ID NO: 10940 - DNA, 20 bp, Artificial Sequence
  Description of Artificial Sequence: Synthetic oligonucleotide
gctggaagcctgccactgac

SEQ ID NO: 10941 - DNA, 20 bp, Artificial Sequence
  Description of Artificial Sequence: Synthetic oligonucleotide
ctggaagcctgccactgacc

SEQ ID NO: 10942 - DNA, 20 bp, Artificial Sequence
  Description of Artificial Sequence: Synthetic oligonucleotide
tggaagcctgccactgaccc

SEQ ID NO: 10943 - DNA, 20 bp, Artificial Sequence
  Description of Artificial Sequence: Synthetic oligonucleotide
ggaagcctgccactgaccct

SEQ ID NO: 10944 - DNA, 20 bp, Artificial Sequence
  Description of Artificial Sequence: Synthetic oligonucleotide
gaagcctgccactgacccta

SEQ ID NO: 10945 - DNA, 20 bp, Artificial Sequence
  Description of Artificial Sequence: Synthetic oligonucleotide
aagcctgccactgaccctag

SEQ ID NO: 10946 - DNA, 20 bp, Artificial Sequence
  Description of Artificial Sequence: Synthetic oligonucleotide
agcctgccactgaccctagg

SEQ ID NO: 10947 - DNA, 20 bp, Artificial Sequence
  Description of Artificial Sequence: Synthetic oligonucleotide
gcctgccactgaccctaggg

SEQ ID NO: 10948 - DNA, 20 bp, Artificial Sequence
  Description of Artificial Sequence: Synthetic oligonucleotide
cctgccactgaccctagggt

SEQ ID NO: 10949 - DNA, 20 bp, Artificial Sequence
  Description of Artificial Sequence: Synthetic oligonucleotide
ctgccactgaccctagggtg

SEQ ID NO: 10950 - DNA, 20 bp, Artificial Sequence
  Description of Artificial Sequence: Synthetic oligonucleotide
tgccactgaccctagggtgt

SEQ ID NO: 10951 - DNA, 20 bp, Artificial Sequence
  Description of Artificial Sequence: Synthetic oligonucleotide
gccactgaccctagggtgtg

SEQ ID NO: 10952 - DNA, 20 bp, Artificial Sequence
  Description of Artificial Sequence: Synthetic oligonucleotide
ccactgaccctagggtgtga

SEQ ID NO: 10953 - DNA, 20 bp, Artificial Sequence
  Description of Artificial Sequence: Synthetic oligonucleotide
cactgaccctagggtgtgag

SEQ ID NO: 10954 - DNA, 20 bp, Artificial Sequence
  Description of Artificial Sequence: Synthetic oligonucleotide
actgaccctagggtgtgaga

SEQ ID NO: 10955 - DNA, 20 bp, Artificial Sequence
  Description of Artificial Sequence: Synthetic oligonucleotide
ctgaccctagggtgtgagag

SEQ ID NO: 10956 - DNA, 20 bp, Artificial Sequence
  Description of Artificial Sequence: Synthetic oligonucleotide
tgaccctagggtgtgagagg

SEQ ID NO: 10957 - DNA, 20 bp, Artificial Sequence
  Description of Artificial Sequence: Synthetic oligonucleotide
gaccctagggtgtgagaggg

SEQ ID NO: 10958 - DNA, 20 bp, Artificial Sequence
  Description of Artificial Sequence: Synthetic oligonucleotide
accctagggtgtgagagggg

SEQ ID NO: 10959 - DNA, 20 bp, Artificial Sequence
  Description of Artificial Sequence: Synthetic oligonucleotide
ccctagggtgtgagaggggg

SEQ ID NO: 10960 - DNA, 20 bp, Artificial Sequence
  Description of Artificial Sequence: Synthetic oligonucleotide
cctagggtgtgagaggggga

SEQ ID NO: 10961 - DNA, 20 bp, Artificial Sequence
  Description of Artificial Sequence: Synthetic oligonucleotide
ctagggtgtgagagggggat

SEQ ID NO: 10962 - DNA, 20 bp, Artificial Sequence
  Description of Artificial Sequence: Synthetic oligonucleotide
tagggtgtgagagggggatc

SEQ ID NO: 10963 - DNA, 20 bp, Artificial Sequence
  Description of Artificial Sequence: Synthetic oligonucleotide
agggtgtgagagggggatcc

SEQ ID NO: 10964 - DNA, 20 bp, Artificial Sequence
  Description of Artificial Sequence: Synthetic oligonucleotide
gggtgtgagagggggatcca

SEQ ID NO: 10965 - DNA, 20 bp, Artificial Sequence
  Description of Artificial Sequence: Synthetic oligonucleotide
ggtgtgagagggggatccaa

SEQ ID NO: 10966 - DNA, 20 bp, Artificial Sequence
  Description of Artificial Sequence: Synthetic oligonucleotide
gtgtgagagggggatccaaa

SEQ ID NO: 10967 - DNA, 20 bp, Artificial Sequence
  Description of Artificial Sequence: Synthetic oligonucleotide
tgtgagagggggatccaaac

SEQ ID NO: 10968 - DNA, 20 bp, Artificial Sequence
  Description of Artificial Sequence: Synthetic oligonucleotide
gtgagagggggatccaaact

SEQ ID NO: 10969 - DNA, 20 bp, Artificial Sequence
  Description of Artificial Sequence: Synthetic oligonucleotide
tgagagggggatccaaactt

SEQ ID NO: 10970 - DNA, 20 bp, Artificial Sequence
  Description of Artificial Sequence: Synthetic oligonucleotide
gagagggggatccaaacttt

SEQ ID NO: 10971 - DNA, 20 bp, Artificial Sequence
  Description of Artificial Sequence: Synthetic oligonucleotide
agagggggatccaaactttc

SEQ ID NO: 10972 - DNA, 20 bp, Artificial Sequence
  Description of Artificial Sequence: Synthetic oligonucleotide
gagggggatccaaactttca

SEQ ID NO: 10973 - DNA, 20 bp, Artificial Sequence
  Description of Artificial Sequence: Synthetic oligonucleotide
agggggatccaaactttcac

SEQ ID NO: 10974 - DNA, 20 bp, Artificial Sequence
  Description of Artificial Sequence: Synthetic oligonucleotide
gggggatccaaactttcacc

SEQ ID NO: 10975 - DNA, 20 bp, Artificial Sequence
  Description of Artificial Sequence: Synthetic oligonucleotide
ggggatccaaactttcaccc

SEQ ID NO: 10976 - DNA, 20 bp, Artificial Sequence
  Description of Artificial Sequence: Synthetic oligonucleotide
gggatccaaactttcaccca

SEQ ID NO: 10977 - DNA, 20 bp, Artificial Sequence
  Description of Artificial Sequence: Synthetic oligonucleotide
ggatccaaactttcacccag

SEQ ID NO: 10978 - DNA, 20 bp, Artificial Sequence
  Description of Artificial Sequence: Synthetic oligonucleotide
gatccaaactttcacccagt

SEQ ID NO: 10979 - DNA, 20 bp, Artificial Sequence
  Description of Artificial Sequence: Synthetic oligonucleotide
atccaaactttcacccagtt

SEQ ID NO: 10980 - DNA, 20 bp, Artificial Sequence
  Description of Artificial Sequence: Synthetic oligonucleotide
tccaaactttcacccagttg

SEQ ID NO: 10981 - DNA, 20 bp, Artificial Sequence
  Description of Artificial Sequence: Synthetic oligonucleotide
ccaaactttcacccagttgg

SEQ ID NO: 10982 - DNA, 20 bp, Artificial Sequence
  Description of Artificial Sequence: Synthetic oligonucleotide
caaactttcacccagttggc

SEQ ID NO: 10983 - DNA, 20 bp, Artificial Sequence
  Description of Artificial Sequence: Synthetic oligonucleotide
aaactttcacccagttggct

SEQ ID NO: 10984 - DNA, 20 bp, Artificial Sequence
  Description of Artificial Sequence: Synthetic oligonucleotide
aactttcacccagttggctg

SEQ ID NO: 10985 - DNA, 20 bp, Artificial Sequence
  Description of Artificial Sequence: Synthetic oligonucleotide
actttcacccagttggctgt

SEQ ID NO: 10986 - DNA, 20 bp, Artificial Sequence
  Description of Artificial Sequence: Synthetic oligonucleotide
ctttcacccagttggctgtg

SEQ ID NO: 10987 - DNA, 20 bp, Artificial Sequence
  Description of Artificial Sequence: Synthetic oligonucleotide
tttcacccagttggctgtgg

SEQ ID NO: 10988 - DNA, 20 bp, Artificial Sequence
  Description of Artificial Sequence: Synthetic oligonucleotide
ttcacccagttggctgtgga

SEQ ID NO: 10989 - DNA, 20 bp, Artificial Sequence
  Description of Artificial Sequence: Synthetic oligonucleotide
tcacccagttggctgtggac

SEQ ID NO: 10990 - DNA, 20 bp, Artificial Sequence
  Description of Artificial Sequence: Synthetic oligonucleotide
cacccagttggctgtggaca

SEQ ID NO: 10991 - DNA, 20 bp, Artificial Sequence
  Description of Artificial Sequence: Synthetic oligonucleotide
acccagttggctgtggacag

SEQ ID NO: 10992 - DNA, 20 bp, Artificial Sequence
  Description of Artificial Sequence: Synthetic oligonucleotide
cccagttggctgtggacagc

SEQ ID NO: 10993 - DNA, 20 bp, Artificial Sequence
  Description of Artificial Sequence: Synthetic oligonucleotide
ccagttggctgtggacagcc

SEQ ID NO: 10994 - DNA, 20 bp, Artificial Sequence
  Description of Artificial Sequence: Synthetic oligonucleotide
cagttggctgtggacagcca

SEQ ID NO: 10995 - DNA, 20 bp, Artificial Sequence
  Description of Artificial Sequence: Synthetic oligonucleotide
agttggctgtggacagccac

SEQ ID NO: 10996 - DNA, 20 bp, Artificial Sequence
  Description of Artificial Sequence: Synthetic oligonucleotide
gttggctgtggacagccaca

SEQ ID NO: 10997 - DNA, 20 bp, Artificial Sequence
  Description of Artificial Sequence: Synthetic oligonucleotide
ttggctgtggacagccacag

SEQ ID NO: 10998 - DNA, 20 bp, Artificial Sequence
  Description of Artificial Sequence: Synthetic oligonucleotide
tggctgtggacagccacaga

SEQ ID NO: 10999 - DNA, 20 bp, Artificial Sequence
  Description of Artificial Sequence: Synthetic oligonucleotide
ggctgtggacagccacagat

SEQ ID NO: 11000 - DNA, 20 bp, Artificial Sequence
  Description of Artificial Sequence: Synthetic oligonucleotide
gctgtggacagccacagatg

SEQ ID NO: 11001 - DNA, 20 bp, Artificial Sequence
  Description of Artificial Sequence: Synthetic oligonucleotide
ctgtggacagccacagatgc

SEQ ID NO: 11002 - DNA, 20 bp, Artificial Sequence
  Description of Artificial Sequence: Synthetic oligonucleotide
tgtggacagccacagatgca

SEQ ID NO: 11003 - DNA, 20 bp, Artificial Sequence
  Description of Artificial Sequence: Synthetic oligonucleotide
gtggacagccacagatgcag

SEQ ID NO: 11004 - DNA, 20 bp, Artificial Sequence
  Description of Artificial Sequence: Synthetic oligonucleotide
tggacagccacagatgcagg

SEQ ID NO: 11005 - DNA, 20 bp, Artificial Sequence
  Description of Artificial Sequence: Synthetic oligonucleotide
ggacagccacagatgcaggg

SEQ ID NO: 11006 - DNA, 20 bp, Artificial Sequence
  Description of Artificial Sequence: Synthetic oligonucleotide
gacagccacagatgcaggga

SEQ ID NO: 11007 - DNA, 20 bp, Artificial Sequence
  Description of Artificial Sequence: Synthetic oligonucleotide
acagccacagatgcagggaa

SEQ ID NO: 11008 - DNA, 20 bp, Artificial Sequence
  Description of Artificial Sequence: Synthetic oligonucleotide
cagccacagatgcagggaag

SEQ ID NO: 11009 - DNA, 20 bp, Artificial Sequence
  Description of Artificial Sequence: Synthetic oligonucleotide
agccacagatgcagggaagg

SEQ ID NO: 11010 - DNA, 20 bp, Artificial Sequence
  Description of Artificial Sequence: Synthetic oligonucleotide
gccacagatgcagggaagga

SEQ ID NO: 11011 - DNA, 20 bp, Artificial Sequence
  Description of Artificial Sequence: Synthetic oligonucleotide
ccacagatgcagggaaggat

SEQ ID NO: 11012 - DNA, 20 bp, Artificial Sequence
  Description of Artificial Sequence: Synthetic oligonucleotide
cacagatgcagggaaggatg

SEQ ID NO: 11013 - DNA, 20 bp, Artificial Sequence
  Description of Artificial Sequence: Synthetic oligonucleotide
acagatgcagggaaggatga

SEQ ID NO: 11014 - DNA, 20 bp, Artificial Sequence
  Description of Artificial Sequence: Synthetic oligonucleotide
cagatgcagggaaggatgag

SEQ ID NO: 11015 - DNA, 20 bp, Artificial Sequence
  Description of Artificial Sequence: Synthetic oligonucleotide
agatgcagggaaggatgagg

SEQ ID NO: 11016 - DNA, 20 bp, Artificial Sequence
  Description of Artificial Sequence: Synthetic oligonucleotide
gatgcagggaaggatgagga

SEQ ID NO: 11017 - DNA, 20 bp, Artificial Sequence
  Description of Artificial Sequence: Synthetic oligonucleotide
atgcagggaaggatgaggac

SEQ ID NO: 11018 - DNA, 20 bp, Artificial Sequence
  Description of Artificial Sequence: Synthetic oligonucleotide
tgcagggaaggatgaggacc

SEQ ID NO: 11019 - DNA, 20 bp, Artificial Sequence
  Description of Artificial Sequence: Synthetic oligonucleotide
gcagggaaggatgaggacca

SEQ ID NO: 11020 - DNA, 20 bp, Artificial Sequence
  Description of Artificial Sequence: Synthetic oligonucleotide
cagggaaggatgaggaccac

SEQ ID NO: 11021 - DNA, 20 bp, Artificial Sequence
  Description of Artificial Sequence: Synthetic oligonucleotide
agggaaggatgaggaccaca

SEQ ID NO: 11022 - DNA, 20 bp, Artificial Sequence
  Description of Artificial Sequence: Synthetic oligonucleotide
gggaaggatgaggaccacag

SEQ ID NO: 11023 - DNA, 20 bp, Artificial Sequence
  Description of Artificial Sequence: Synthetic oligonucleotide
ggaaggatgaggaccacaga

SEQ ID NO: 11024 - DNA, 20 bp, Artificial Sequence
  Description of Artificial Sequence: Synthetic oligonucleotide
gaaggatgaggaccacagag

SEQ ID NO: 11025 - DNA, 20 bp, Artificial Sequence
  Description of Artificial Sequence: Synthetic oligonucleotide
aaggatgaggaccacagaga

SEQ ID NO: 11026 - DNA, 20 bp, Artificial Sequence
  Description of Artificial Sequence: Synthetic oligonucleotide
aggatgaggaccacagagaa

SEQ ID NO: 11027 - DNA, 20 bp, Artificial Sequence
  Description of Artificial Sequence: Synthetic oligonucleotide
ggatgaggaccacagagaaa

SEQ ID NO: 11028 - DNA, 20 bp, Artificial Sequence
  Description of Artificial Sequence: Synthetic oligonucleotide
gatgaggaccacagagaaac

SEQ ID NO: 11029 - DNA, 20 bp, Artificial Sequence
  Description of Artificial Sequence: Synthetic oligonucleotide
atgaggaccacagagaaacc

SEQ ID NO: 11030 - DNA, 20 bp, Artificial Sequence
  Description of Artificial Sequence: Synthetic oligonucleotide
tgaggaccacagagaaaccg

SEQ ID NO: 11031 - DNA, 20 bp, Artificial Sequence
  Description of Artificial Sequence: Synthetic oligonucleotide
gaggaccacagagaaaccgt

SEQ ID NO: 11032 - DNA, 20 bp, Artificial Sequence
  Description of Artificial Sequence: Synthetic oligonucleotide
aggaccacagagaaaccgtg

SEQ ID NO: 11033 - DNA, 20 bp, Artificial Sequence
  Description of Artificial Sequence: Synthetic oligonucleotide
ggaccacagagaaaccgtgt

SEQ ID NO: 11034 - DNA, 20 bp, Artificial Sequence
  Description of Artificial Sequence: Synthetic oligonucleotide
gaccacagagaaaccgtgtg

SEQ ID NO: 11035 - DNA, 20 bp, Artificial Sequence
  Description of Artificial Sequence: Synthetic oligonucleotide
accacagagaaaccgtgtgg

SEQ ID NO: 11036 - DNA, 20 bp, Artificial Sequence
  Description of Artificial Sequence: Synthetic oligonucleotide
ccacagagaaaccgtgtggg

SEQ ID NO: 11037 - DNA, 20 bp, Artificial Sequence
  Description of Artificial Sequence: Synthetic oligonucleotide
cacagagaaaccgtgtgggg

SEQ ID NO: 11038 - DNA, 20 bp, Artificial Sequence
  Description of Artificial Sequence: Synthetic oligonucleotide
acagagaaaccgtgtggggc

SEQ ID NO: 11039 - DNA, 20 bp, Artificial Sequence
  Description of Artificial Sequence: Synthetic oligonucleotide
cagagaaaccgtgtggggcc

SEQ ID NO: 11040 - DNA, 20 bp, Artificial Sequence
  Description of Artificial Sequence: Synthetic oligonucleotide
agagaaaccgtgtggggccg

SEQ ID NO: 11041 - DNA, 20 bp, Artificial Sequence
  Description of Artificial Sequence: Synthetic oligonucleotide
gagaaaccgtgtggggccgt

SEQ ID NO: 11042 - DNA, 20 bp, Artificial Sequence
  Description of Artificial Sequence: Synthetic oligonucleotide
agaaaccgtgtggggccgtg

SEQ ID NO: 11043 - DNA, 20 bp, Artificial Sequence
  Description of Artificial Sequence: Synthetic oligonucleotide
gaaaccgtgtggggccgtga

SEQ ID NO: 11044 - DNA, 20 bp, Artificial Sequence
  Description of Artificial Sequence: Synthetic oligonucleotide
aaaccgtgtggggccgtgaa

SEQ ID NO: 11045 - DNA, 20 bp, Artificial Sequence
  Description of Artificial Sequence: Synthetic oligonucleotide
aaccgtgtggggccgtgaac

SEQ ID NO: 11046 - DNA, 20 bp, Artificial Sequence
  Description of Artificial Sequence: Synthetic oligonucleotide
accgtgtggggccgtgaact

SEQ ID NO: 11047 - DNA, 20 bp, Artificial Sequence
  Description of Artificial Sequence: Synthetic oligonucleotide
ccgtgtggggccgtgaactt

SEQ ID NO: 11048 - DNA, 20 bp, Artificial Sequence
  Description of Artificial Sequence: Synthetic oligonucleotide
cgtgtggggccgtgaactta

SEQ ID NO: 11049 - DNA, 20 bp, Artificial Sequence
  Description of Artificial Sequence: Synthetic oligonucleotide
gtgtggggccgtgaacttag

SEQ ID NO: 11050 - DNA, 20 bp, Artificial Sequence
  Description of Artificial Sequence: Synthetic oligonucleotide
tgtggggccgtgaacttaga

SEQ ID NO: 11051 - DNA, 20 bp, Artificial Sequence
  Description of Artificial Sequence: Synthetic oligonucleotide
gtggggccgtgaacttagag

SEQ ID NO: 11052 - DNA, 20 bp, Artificial Sequence
  Description of Artificial Sequence: Synthetic oligonucleotide
tggggccgtgaacttagaga

SEQ ID NO: 11053 - DNA, 20 bp, Artificial Sequence
  Description of Artificial Sequence: Synthetic oligonucleotide
ggggccgtgaacttagagaa

SEQ ID NO: 11054 - DNA, 20 bp, Artificial Sequence
  Description of Artificial Sequence: Synthetic oligonucleotide
gggccgtgaacttagagaac

SEQ ID NO: 11055 - DNA, 20 bp, Artificial Sequence
  Description of Artificial Sequence: Synthetic oligonucleotide
ggccgtgaacttagagaacc

SEQ ID NO: 11056 - DNA, 20 bp, Artificial Sequence
  Description of Artificial Sequence: Synthetic oligonucleotide
gccgtgaacttagagaaccg

SEQ ID NO: 11057 - DNA, 20 bp, Artificial Sequence
  Description of Artificial Sequence: Synthetic oligonucleotide
ccgtgaacttagagaaccgc

SEQ ID NO: 11058 - DNA, 20 bp, Artificial Sequence
  Description of Artificial Sequence: Synthetic oligonucleotide
cgtgaacttagagaaccgcg

SEQ ID NO: 11059 - DNA, 20 bp, Artificial Sequence
  Description of Artificial Sequence: Synthetic oligonucleotide
gtgaacttagagaaccgcga

SEQ ID NO: 11060 - DNA, 20 bp, Artificial Sequence
  Description of Artificial Sequence: Synthetic oligonucleotide
tgaacttagagaaccgcgag

SEQ ID NO: 11061 - DNA, 20 bp, Artificial Sequence
  Description of Artificial Sequence: Synthetic oligonucleotide
gaacttagagaaccgcgagt

SEQ ID NO: 11062 - DNA, 20 bp, Artificial Sequence
  Description of Artificial Sequence: Synthetic oligonucleotide
aacttagagaaccgcgagtc

SEQ ID NO: 11063 - DNA, 20 bp, Artificial Sequence
  Description of Artificial Sequence: Synthetic oligonucleotide
acttagagaaccgcgagtct

SEQ ID NO: 11064 - DNA, 20 bp, Artificial Sequence
  Description of Artificial Sequence: Synthetic oligonucleotide
cttagagaaccgcgagtctg

SEQ ID NO: 11065 - DNA, 20 bp, Artificial Sequence
  Description of Artificial Sequence: Synthetic oligonucleotide
ttagagaaccgcgagtctgc

SEQ ID NO: 11066 - DNA, 20 bp, Artificial Sequence
  Description of Artificial Sequence: Synthetic oligonucleotide
tagagaaccgcgagtctgca

SEQ ID NO: 11067 - DNA, 20 bp, Artificial Sequence
  Description of Artificial Sequence: Synthetic oligonucleotide
agagaaccgcgagtctgcat

SEQ ID NO: 11068 - DNA, 20 bp, Artificial Sequence
  Description of Artificial Sequence: Synthetic oligonucleotide
gagaaccgcgagtctgcatc

SEQ ID NO: 11069 - DNA, 20 bp, Artificial Sequence
  Description of Artificial Sequence: Synthetic oligonucleotide
agaaccgcgagtctgcatcg

SEQ ID NO: 11070 - DNA, 20 bp, Artificial Sequence
  Description of Artificial Sequence: Synthetic oligonucleotide
gaaccgcgagtctgcatcgg

SEQ ID NO: 11071 - DNA, 20 bp, Artificial Sequence
  Description of Artificial Sequence: Synthetic oligonucleotide
aaccgcgagtctgcatcgga

SEQ ID NO: 11072 - DNA, 20 bp, Artificial Sequence
  Description of Artificial Sequence: Synthetic oligonucleotide
accgcgagtctgcatcggac

SEQ ID NO: 11073 - DNA, 20 bp, Artificial Sequence
  Description of Artificial Sequence: Synthetic oligonucleotide
ccgcgagtctgcatcggaca

SEQ ID NO: 11074 - DNA, 20 bp, Artificial Sequence
  Description of Artificial Sequence: Synthetic oligonucleotide
cgcgagtctgcatcggacac

SEQ ID NO: 11075 - DNA, 20 bp, Artificial Sequence
  Description of Artificial Sequence: Synthetic oligonucleotide
gcgagtctgcatcggacaca

SEQ ID NO: 11076 - DNA, 20 bp, Artificial Sequence
  Description of Artificial Sequence: Synthetic oligonucleotide
cgagtctgcatcggacacac

SEQ ID NO: 11077 - DNA, 20 bp, Artificial Sequence
  Description of Artificial Sequence: Synthetic oligonucleotide
gagtctgcatcggacacacg

SEQ ID NO: 11078 - DNA, 20 bp, Artificial Sequence
  Description of Artificial Sequence: Synthetic oligonucleotide
agtctgcatcggacacacgt

SEQ ID NO: 11079 - DNA, 20 bp, Artificial Sequence
  Description of Artificial Sequence: Synthetic oligonucleotide
gtctgcatcggacacacgtg

SEQ ID NO: 11080 - DNA, 20 bp, Artificial Sequence
  Description of Artificial Sequence: Synthetic oligonucleotide
tctgcatcggacacacgtgg

SEQ ID NO: 11081 - DNA, 20 bp, Artificial Sequence
  Description of Artificial Sequence: Synthetic oligonucleotide
ctgcatcggacacacgtgga

SEQ ID NO: 11082 - DNA, 20 bp, Artificial Sequence
  Description of Artificial Sequence: Synthetic oligonucleotide
tgcatcggacacacgtggac

SEQ ID NO: 11083 - DNA, 20 bp, Artificial Sequence
  Description of Artificial Sequence: Synthetic oligonucleotide
gcatcggacacacgtggaca

SEQ ID NO: 11084 - DNA, 20 bp, Artificial Sequence
  Description of Artificial Sequence: Synthetic oligonucleotide
catcggacacacgtggacat

SEQ ID NO: 11085 - DNA, 20 bp, Artificial Sequence
  Description of Artificial Sequence: Synthetic oligonucleotide
atcggacacacgtggacatg

SEQ ID NO: 11086 - DNA, 20 bp, Artificial Sequence
  Description of Artificial Sequence: Synthetic oligonucleotide
tcggacacacgtggacatgc

SEQ ID NO: 11087 - DNA, 20 bp, Artificial Sequence
  Description of Artificial Sequence: Synthetic oligonucleotide
cggacacacgtggacatgct

SEQ ID NO: 11088 - DNA, 20 bp, Artificial Sequence
  Description of Artificial Sequence: Synthetic oligonucleotide
ggacacacgtggacatgctg

SEQ ID NO: 11089 - DNA, 20 bp, Artificial Sequence
  Description of Artificial Sequence: Synthetic oligonucleotide
gacacacgtggacatgctgt

SEQ ID NO: 11090 - DNA, 20 bp, Artificial Sequence
  Description of Artificial Sequence: Synthetic oligonucleotide
acacacgtggacatgctgtg

SEQ ID NO: 11091 - DNA, 20 bp, Artificial Sequence
  Description of Artificial Sequence: Synthetic oligonucleotide
cacacgtggacatgctgtgg

SEQ ID NO: 11092 - DNA, 20 bp, Artificial Sequence
  Description of Artificial Sequence: Synthetic oligonucleotide
acacgtggacatgctgtggt

SEQ ID NO: 11093 - DNA, 20 bp, Artificial Sequence
  Description of Artificial Sequence: Synthetic oligonucleotide
cacgtggacatgctgtggtt

SEQ ID NO: 11094 - DNA, 20 bp, Artificial Sequence
  Description of Artificial Sequence: Synthetic oligonucleotide
acgtggacatgctgtggttc

SEQ ID NO: 11095 - DNA, 20 bp, Artificial Sequence
  Description of Artificial Sequence: Synthetic oligonucleotide
cgtggacatgctgtggttcg

SEQ ID NO: 11096 - DNA, 20 bp, Artificial Sequence
  Description of Artificial Sequence: Synthetic oligonucleotide
gtggacatgctgtggttcga

SEQ ID NO: 11097 - DNA, 20 bp, Artificial Sequence
  Description of Artificial Sequence: Synthetic oligonucleotide
tggacatgctgtggttcgag

SEQ ID NO: 11098 - DNA, 20 bp, Artificial Sequence
  Description of Artificial Sequence: Synthetic oligonucleotide
ggacatgctgtggttcgaga

SEQ ID NO: 11099 - DNA, 20 bp, Artificial Sequence
  Description of Artificial Sequence: Synthetic oligonucleotide
gacatgctgtggttcgagat

SEQ ID NO: 11100 - DNA, 20 bp, Artificial Sequence
  Description of Artificial Sequence: Synthetic oligonucleotide
acatgctgtggttcgagatg

SEQ ID NO: 11101 - DNA, 20 bp, Artificial Sequence
  Description of Artificial Sequence: Synthetic oligonucleotide
catgctgtggttcgagatga

SEQ ID NO: 11102 - DNA, 20 bp, Artificial Sequence
  Description of Artificial Sequence: Synthetic oligonucleotide
atgctgtggttcgagatgaa

SEQ ID NO: 11103 - DNA, 20 bp, Artificial Sequence
  Description of Artificial Sequence: Synthetic oligonucleotide
tgctgtggttcgagatgaac

SEQ ID NO: 11104 - DNA, 20 bp, Artificial Sequence
  Description of Artificial Sequence: Synthetic oligonucleotide
gctgtggttcgagatgaacg

SEQ ID NO: 11105 - DNA, 20 bp, Artificial Sequence
  Description of Artificial Sequence: Synthetic oligonucleotide
ctgtggttcgagatgaacgg

SEQ ID NO: 11106 - DNA, 20 bp, Artificial Sequence
  Description of Artificial Sequence: Synthetic oligonucleotide
tgtggttcgagatgaacgga

SEQ ID NO: 11107 - DNA, 20 bp, Artificial Sequence
  Description of Artificial Sequence: Synthetic oligonucleotide
gtggttcgagatgaacggag

SEQ ID NO: 11108 - DNA, 20 bp, Artificial Sequence
  Description of Artificial Sequence: Synthetic oligonucleotide
tggttcgagatgaacggaga

SEQ ID NO: 11109 - DNA, 20 bp, Artificial Sequence
  Description of Artificial Sequence: Synthetic oligonucleotide
ggttcgagatgaacggagat

SEQ ID NO: 11110 - DNA, 20 bp, Artificial Sequence
  Description of Artificial Sequence: Synthetic oligonucleotide
gttcgagatgaacggagatt

SEQ ID NO: 11111 - DNA, 20 bp, Artificial Sequence
  Description of Artificial Sequence: Synthetic oligonucleotide
ttcgagatgaacggagattt

SEQ ID NO: 11112 - DNA, 20 bp, Artificial Sequence
  Description of Artificial Sequence: Synthetic oligonucleotide
tcgagatgaacggagatttg

SEQ ID NO: 11113 - DNA, 20 bp, Artificial Sequence
  Description of Artificial Sequence: Synthetic oligonucleotide
cgagatgaacggagatttgg

SEQ ID NO: 11114 - DNA, 20 bp, Artificial Sequence
  Description of Artificial Sequence: Synthetic oligonucleotide
gagatgaacggagatttggg

SEQ ID NO: 11115 - DNA, 20 bp, Artificial Sequence
  Description of Artificial Sequence: Synthetic oligonucleotide
agatgaacggagatttggga

SEQ ID NO: 11116 - DNA, 20 bp, Artificial Sequence
  Description of Artificial Sequence: Synthetic oligonucleotide
gatgaacggagatttgggaa

SEQ ID NO: 11117 - DNA, 20 bp, Artificial Sequence
  Description of Artificial Sequence: Synthetic oligonucleotide
atgaacggagatttgggaat

SEQ ID NO: 11118 - DNA, 20 bp, Artificial Sequence
  Description of Artificial Sequence: Synthetic oligonucleotide
tgaacggagatttgggaata

SEQ ID NO: 11119 - DNA, 20 bp, Artificial Sequence
  Description of Artificial Sequence: Synthetic oligonucleotide
gaacggagatttgggaataa

SEQ ID NO: 11120 - DNA, 20 bp, Artificial Sequence
  Description of Artificial Sequence: Synthetic oligonucleotide
aacggagatttgggaataaa

SEQ ID NO: 11121 - DNA, 20 bp, Artificial Sequence
  Description of Artificial Sequence: Synthetic oligonucleotide
acggagatttgggaataaag

SEQ ID NO: 11122 - DNA, 20 bp, Artificial Sequence
  Description of Artificial Sequence: Synthetic oligonucleotide
cggagatttgggaataaagc

SEQ ID NO: 11123 - DNA, 20 bp, Artificial Sequence
  Description of Artificial Sequence: Synthetic oligonucleotide
ggagatttgggaataaagca

SEQ ID NO: 11124 - DNA, 20 bp, Artificial Sequence
  Description of Artificial Sequence: Synthetic oligonucleotide
gagatttgggaataaagcac

SEQ ID NO: 11125 - DNA, 20 bp, Artificial Sequence
  Description of Artificial Sequence: Synthetic oligonucleotide
agatttgggaataaagcacc

SEQ ID NO: 11126 - DNA, 20 bp, Artificial Sequence
  Description of Artificial Sequence: Synthetic oligonucleotide
gatttgggaataaagcacct

SEQ ID NO: 11127 - DNA, 20 bp, Artificial Sequence
  Description of Artificial Sequence: Synthetic oligonucleotide
atttgggaataaagcaccta

SEQ ID NO: 11128 - DNA, 20 bp, Artificial Sequence
  Description of Artificial Sequence: Synthetic oligonucleotide
tttgggaataaagcacctac

SEQ ID NO: 11129 - DNA, 20 bp, Artificial Sequence
  Description of Artificial Sequence: Synthetic oligonucleotide
ttgggaataaagcacctaca

SEQ ID NO: 11130 - DNA, 20 bp, Artificial Sequence
  Description of Artificial Sequence: Synthetic oligonucleotide
tgggaataaagcacctacaa

SEQ ID NO: 11131 - DNA, 20 bp, Artificial Sequence
  Description of Artificial Sequence: Synthetic oligonucleotide
gggaataaagcacctacaac

SEQ ID NO: 11132 - DNA, 20 bp, Artificial Sequence
  Description of Artificial Sequence: Synthetic oligonucleotide
ggaataaagcacctacaact

SEQ ID NO: 11133 - DNA, 20 bp, Artificial Sequence
  Description of Artificial Sequence: Synthetic oligonucleotide
gaataaagcacctacaactt

SEQ ID NO: 11134 - DNA, 20 bp, Artificial Sequence
  Description of Artificial Sequence: Synthetic oligonucleotide
aataaagcacctacaacttg

SEQ ID NO: 11135 - DNA, 20 bp, Artificial Sequence
  Description of Artificial Sequence: Synthetic oligonucleotide
ataaagcacctacaacttgt

SEQ ID NO: 11136 - DNA, 20 bp, Artificial Sequence
  Description of Artificial Sequence: Synthetic oligonucleotide
taaagcacctacaacttgtg

SEQ ID NO: 11137 - DNA, 20 bp, Artificial Sequence
  Description of Artificial Sequence: Synthetic oligonucleotide
aaagcacctacaacttgtgg

SEQ ID NO: 11138 - DNA, 20 bp, Artificial Sequence
  Description of Artificial Sequence: Synthetic oligonucleotide
aagcacctacaacttgtggt

SEQ ID NO: 11139 - DNA, 20 bp, Artificial Sequence
  Description of Artificial Sequence: Synthetic oligonucleotide
agcacctacaacttgtggtg

SEQ ID NO: 11140 - DNA, 20 bp, Artificial Sequence
  Description of Artificial Sequence: Synthetic oligonucleotide
gcacctacaacttgtggtgg

SEQ ID NO: 11141 - DNA, 20 bp, Artificial Sequence
  Description of Artificial Sequence: Synthetic oligonucleotide
cacctacaacttgtggtggc

SEQ ID NO: 11142 - DNA, 20 bp, Artificial Sequence
  Description of Artificial Sequence: Synthetic oligonucleotide
acctacaacttgtggtggca

SEQ ID NO: 11143 - DNA, 20 bp, Artificial Sequence
  Description of Artificial Sequence: Synthetic oligonucleotide
cctacaacttgtggtggcag

SEQ ID NO: 11144 - DNA, 20 bp, Artificial Sequence
  Description of Artificial Sequence: Synthetic oligonucleotide
ctacaacttgtggtggcagc

SEQ ID NO: 11145 - DNA, 20 bp, Artificial Sequence
  Description of Artificial Sequence: Synthetic oligonucleotide
tacaacttgtggtggcagca

SEQ ID NO: 11146 - DNA, 20 bp, Artificial Sequence
  Description of Artificial Sequence: Synthetic oligonucleotide
acaacttgtggtggcagcaa

SEQ ID NO: 11147 - DNA, 20 bp, Artificial Sequence
  Description of Artificial Sequence: Synthetic oligonucleotide
caacttgtggtggcagcaaa

SEQ ID NO: 11148 - DNA, 20 bp, Artificial Sequence
  Description of Artificial Sequence: Synthetic oligonucleotide
aacttgtggtggcagcaaaa

SEQ ID NO: 11149 - DNA, 20 bp, Artificial Sequence
  Description of Artificial Sequence: Synthetic oligonucleotide
acttgtggtggcagcaaaag

SEQ ID NO: 11150 - DNA, 20 bp, Artificial Sequence
  Description of Artificial Sequence: Synthetic oligonucleotide
cttgtggtggcagcaaaagc

SEQ ID NO: 11151 - DNA, 20 bp, Artificial Sequence
  Description of Artificial Sequence: Synthetic oligonucleotide
ttgtggtggcagcaaaagcc

SEQ ID NO: 11152 - DNA, 20 bp, Artificial Sequence
  Description of Artificial Sequence: Synthetic oligonucleotide
tgtggtggcagcaaaagccc

SEQ ID NO: 11153 - DNA, 20 bp, Artificial Sequence
  Description of Artificial Sequence: Synthetic oligonucleotide
gtggtggcagcaaaagccca

SEQ ID NO: 11154 - DNA, 20 bp, Artificial Sequence
  Description of Artificial Sequence: Synthetic oligonucleotide
tggtggcagcaaaagcccac

SEQ ID NO: 11155 - DNA, 20 bp, Artificial Sequence
  Description of Artificial Sequence: Synthetic oligonucleotide
ggtggcagcaaaagcccact

SEQ ID NO: 11156 - DNA, 20 bp, Artificial Sequence
  Description of Artificial Sequence: Synthetic oligonucleotide
gtggcagcaaaagcccactt

SEQ ID NO: 11157 - DNA, 20 bp, Artificial Sequence
  Description of Artificial Sequence: Synthetic oligonucleotide
tggcagcaaaagcccacttt

SEQ ID NO: 11158 - DNA, 20 bp, Artificial Sequence
  Description of Artificial Sequence: Synthetic oligonucleotide
ggcagcaaaagcccactttc

SEQ ID NO: 11159 - DNA, 20 bp, Artificial Sequence
  Description of Artificial Sequence: Synthetic oligonucleotide
gcagcaaaagcccactttct

SEQ ID NO: 11160 - DNA, 20 bp, Artificial Sequence
  Description of Artificial Sequence: Synthetic oligonucleotide
cagcaaaagcccactttctg

SEQ ID NO: 11161 - DNA, 20 bp, Artificial Sequence
  Description of Artificial Sequence: Synthetic oligonucleotide
agcaaaagcccactttctgc

SEQ ID NO: 11162 - DNA, 20 bp, Artificial Sequence
  Description of Artificial Sequence: Synthetic oligonucleotide
gcaaaagcccactttctgcg

SEQ ID NO: 11163 - DNA, 20 bp, Artificial Sequence
  Description of Artificial Sequence: Synthetic oligonucleotide
caaaagcccactttctgcgg

SEQ ID NO: 11164 - DNA, 20 bp, Artificial Sequence
  Description of Artificial Sequence: Synthetic oligonucleotide
aaaagcccactttctgcggt

SEQ ID NO: 11165 - DNA, 20 bp, Artificial Sequence
  Description of Artificial Sequence: Synthetic oligonucleotide
aaagcccactttctgcggtg

SEQ ID NO: 11166 - DNA, 20 bp, Artificial Sequence
  Description of Artificial Sequence: Synthetic oligonucleotide
aagcccactttctgcggtgg

SEQ ID NO: 11167 - DNA, 20 bp, Artificial Sequence
  Description of Artificial Sequence: Synthetic oligonucleotide
agcccactttctgcggtggg

SEQ ID NO: 11168 - DNA, 20 bp, Artificial Sequence
  Description of Artificial Sequence: Synthetic oligonucleotide
gcccactttctgcggtgggg

SEQ ID NO: 11169 - DNA, 20 bp, Artificial Sequence
  Description of Artificial Sequence: Synthetic oligonucleotide
cccactttctgcggtgggga

SEQ ID NO: 11170 - DNA, 20 bp, Artificial Sequence
  Description of Artificial Sequence: Synthetic oligonucleotide
ccactttctgcggtggggag

SEQ ID NO: 11171 - DNA, 20 bp, Artificial Sequence
  Description of Artificial Sequence: Synthetic oligonucleotide
cactttctgcggtggggagg

SEQ ID NO: 11172 - DNA, 20 bp, Artificial Sequence
  Description of Artificial Sequence: Synthetic oligonucleotide
actttctgcggtggggaggg

SEQ ID NO: 11173 - DNA, 20 bp, Artificial Sequence
  Description of Artificial Sequence: Synthetic oligonucleotide
ctttctgcggtggggagggg

SEQ ID NO: 11174 - DNA, 20 bp, Artificial Sequence
  Description of Artificial Sequence: Synthetic oligonucleotide
tttctgcggtggggaggggg

SEQ ID NO: 11175 - DNA, 20 bp, Artificial Sequence
  Description of Artificial Sequence: Synthetic oligonucleotide
ttctgcggtggggagggggc

SEQ ID NO: 11176 - DNA, 20 bp, Artificial Sequence
  Description of Artificial Sequence: Synthetic oligonucleotide
tctgcggtggggagggggcc

SEQ ID NO: 11177 - DNA, 20 bp, Artificial Sequence
  Description of Artificial Sequence: Synthetic oligonucleotide
ctgcggtggggagggggccg

SEQ ID NO: 11178 - DNA, 20 bp, Artificial Sequence
  Description of Artificial Sequence: Synthetic oligonucleotide
tgcggtggggagggggccgg

SEQ ID NO: 11179 - DNA, 20 bp, Artificial Sequence
  Description of Artificial Sequence: Synthetic oligonucleotide
gcggtggggagggggccggc

SEQ ID NO: 11180 - DNA, 20 bp, Artificial Sequence
  Description of Artificial Sequence: Synthetic oligonucleotide
cggtggggagggggccggcg

SEQ ID NO: 11181 - DNA, 20 bp, Artificial Sequence
  Description of Artificial Sequence: Synthetic oligonucleotide
ggtggggagggggccggcgg

SEQ ID NO: 11182 - DNA, 20 bp, Artificial Sequence
  Description of Artificial Sequence: Synthetic oligonucleotide
gtggggagggggccggcggg

SEQ ID NO: 11183 - DNA, 20 bp, Artificial Sequence
  Description of Artificial Sequence: Synthetic oligonucleotide
tggggagggggccggcgggg

SEQ ID NO: 11184 - DNA, 20 bp, Artificial Sequence
  Description of Artificial Sequence: Synthetic oligonucleotide
ggggagggggccggcggggg

SEQ ID NO: 11185 - DNA, 20 bp, Artificial Sequence
  Description of Artificial Sequence: Synthetic oligonucleotide
gggagggggccggcgggggc

SEQ ID NO: 11186 - DNA, 20 bp, Artificial Sequence
  Description of Artificial Sequence: Synthetic oligonucleotide
ggagggggccggcgggggcg

SEQ ID NO: 11187 - DNA, 20 bp, Artificial Sequence
  Description of Artificial Sequence: Synthetic oligonucleotide
gagggggccggcgggggcgg

SEQ ID NO: 11188 - DNA, 20 bp, Artificial Sequence
  Description of Artificial Sequence: Synthetic oligonucleotide
agggggccggcgggggcggg

SEQ ID NO: 11189 - DNA, 20 bp, Artificial Sequence
  Description of Artificial Sequence: Synthetic oligonucleotide
gggggccggcgggggcgggg

SEQ ID NO: 11190 - DNA, 20 bp, Artificial Sequence
  Description of Artificial Sequence: Synthetic oligonucleotide
ggggccggcgggggcgggga

SEQ ID NO: 11191 - DNA, 20 bp, Artificial Sequence
  Description of Artificial Sequence: Synthetic oligonucleotide
gggccggcgggggcggggag

SEQ ID NO: 11192 - DNA, 20 bp, Artificial Sequence
  Description of Artificial Sequence: Synthetic oligonucleotide
ggccggcgggggcggggagg

SEQ ID NO: 11193 - DNA, 20 bp, Artificial Sequence
  Description of Artificial Sequence: Synthetic oligonucleotide
gccggcgggggcggggaggg

SEQ ID NO: 11194 - DNA, 20 bp, Artificial Sequence
  Description of Artificial Sequence: Synthetic oligonucleotide
ccggcgggggcggggaggga

SEQ ID NO: 11195 - DNA, 20 bp, Artificial Sequence
  Description of Artificial Sequence: Synthetic oligonucleotide
cggcgggggcggggagggag

SEQ ID NO: 11196 - DNA, 20 bp, Artificial Sequence
  Description of Artificial Sequence: Synthetic oligonucleotide
ggcgggggcggggagggagg

SEQ ID NO: 11197 - DNA, 20 bp, Artificial Sequence
  Description of Artificial Sequence: Synthetic oligonucleotide
gcgggggcggggagggagga

SEQ ID NO: 11198 - DNA, 20 bp, Artificial Sequence
  Description of Artificial Sequence: Synthetic oligonucleotide
cgggggcggggagggaggag

SEQ ID NO: 11199 - DNA, 20 bp, Artificial Sequence
  Description of Artificial Sequence: Synthetic oligonucleotide
gggggcggggagggaggagg

SEQ ID NO: 11200 - DNA, 20 bp, Artificial Sequence
  Description of Artificial Sequence: Synthetic oligonucleotide
ggggcggggagggaggagga

SEQ ID NO: 11201 - DNA, 20 bp, Artificial Sequence
  Description of Artificial Sequence: Synthetic oligonucleotide
gggcggggagggaggaggag

SEQ ID NO: 11202 - DNA, 20 bp, Artificial Sequence
  Description of Artificial Sequence: Synthetic oligonucleotide
ggcggggagggaggaggaga

SEQ ID NO: 11203 - DNA, 20 bp, Artificial Sequence
  Description of Artificial Sequence: Synthetic oligonucleotide
gcggggagggaggaggagaa

SEQ ID NO: 11204 - DNA, 20 bp, Artificial Sequence
  Description of Artificial Sequence: Synthetic oligonucleotide
cggggagggaggaggagaac

SEQ ID NO: 11205 - DNA, 20 bp, Artificial Sequence
  Description of Artificial Sequence: Synthetic oligonucleotide
ggggagggaggaggagaaca

SEQ ID NO: 11206 - DNA, 20 bp, Artificial Sequence
  Description of Artificial Sequence: Synthetic oligonucleotide
gggagggaggaggagaacaa

SEQ ID NO: 11207 - DNA, 20 bp, Artificial Sequence
  Description of Artificial Sequence: Synthetic oligonucleotide
ggagggaggaggagaacaag

SEQ ID NO: 11208 - DNA, 20 bp, Artificial Sequence
  Description of Artificial Sequence: Synthetic oligonucleotide
gagggaggaggagaacaaga

SEQ ID NO: 11209 - DNA, 20 bp, Artificial Sequence
  Description of Artificial Sequence: Synthetic oligonucleotide
agggaggaggagaacaagag

SEQ ID NO: 11210 - DNA, 20 bp, Artificial Sequence
  Description of Artificial Sequence: Synthetic oligonucleotide
gggaggaggagaacaagaga

SEQ ID NO: 11211 - DNA, 20 bp, Artificial Sequence
  Description of Artificial Sequence: Synthetic oligonucleotide
ggaggaggagaacaagagag

SEQ ID NO: 11212 - DNA, 20 bp, Artificial Sequence
  Description of Artificial Sequence: Synthetic oligonucleotide
gaggaggagaacaagagagg

SEQ ID NO: 11213 - DNA, 20 bp, Artificial Sequence
  Description of Artificial Sequence: Synthetic oligonucleotide
aggaggagaacaagagagga

SEQ ID NO: 11214 - DNA, 20 bp, Artificial Sequence
  Description of Artificial Sequence: Synthetic oligonucleotide
ggaggagaacaagagaggaa

SEQ ID NO: 11215 - DNA, 20 bp, Artificial Sequence
  Description of Artificial Sequence: Synthetic oligonucleotide
gaggagaacaagagaggaag

SEQ ID NO: 11216 - DNA, 20 bp, Artificial Sequence
  Description of Artificial Sequence: Synthetic oligonucleotide
aggagaacaagagaggaagg

SEQ ID NO: 11217 - DNA, 20 bp, Artificial Sequence
  Description of Artificial Sequence: Synthetic oligonucleotide
ggagaacaagagaggaagga

SEQ ID NO: 11218 - DNA, 20 bp, Artificial Sequence
  Description of Artificial Sequence: Synthetic oligonucleotide
gagaacaagagaggaaggag

SEQ ID NO: 11219 - DNA, 20 bp, Artificial Sequence
  Description of Artificial Sequence: Synthetic oligonucleotide
agaacaagagaggaaggagg

SEQ ID NO: 11220 - DNA, 20 bp, Artificial Sequence
  Description of Artificial Sequence: Synthetic oligonucleotide
gaacaagagaggaaggagga

SEQ ID NO: 11221 - DNA, 20 bp, Artificial Sequence
  Description of Artificial Sequence: Synthetic oligonucleotide
aacaagagaggaaggaggaa

SEQ ID NO: 11222 - DNA, 20 bp, Artificial Sequence
  Description of Artificial Sequence: Synthetic oligonucleotide
acaagagaggaaggaggaag

SEQ ID NO: 11223 - DNA, 20 bp, Artificial Sequence
  Description of Artificial Sequence: Synthetic oligonucleotide
caagagaggaaggaggaaga

SEQ ID NO: 11224 - DNA, 20 bp, Artificial Sequence
  Description of Artificial Sequence: Synthetic oligonucleotide
aagagaggaaggaggaagag

SEQ ID NO: 11225 - DNA, 20 bp, Artificial Sequence
  Description of Artificial Sequence: Synthetic oligonucleotide
agagaggaaggaggaagagg

SEQ ID NO: 11226 - DNA, 20 bp, Artificial Sequence
  Description of Artificial Sequence: Synthetic oligonucleotide
gagaggaaggaggaagaggg

SEQ ID NO: 11227 - DNA, 20 bp, Artificial Sequence
  Description of Artificial Sequence: Synthetic oligonucleotide
agaggaaggaggaagagggg

SEQ ID NO: 11228 - DNA, 20 bp, Artificial Sequence
  Description of Artificial Sequence: Synthetic oligonucleotide
gaggaaggaggaagaggggt

SEQ ID NO: 11229 - DNA, 20 bp, Artificial Sequence
  Description of Artificial Sequence: Synthetic oligonucleotide
aggaaggaggaagaggggtc

SEQ ID NO: 11230 - DNA, 20 bp, Artificial Sequence
  Description of Artificial Sequence: Synthetic oligonucleotide
ggaaggaggaagaggggtca

SEQ ID NO: 11231 - DNA, 20 bp, Artificial Sequence
  Description of Artificial Sequence: Synthetic oligonucleotide
gaaggaggaagaggggtcag

SEQ ID NO: 11232 - DNA, 20 bp, Artificial Sequence
  Description of Artificial Sequence: Synthetic oligonucleotide
aaggaggaagaggggtcagg

SEQ ID NO: 11233 - DNA, 20 bp, Artificial Sequence
  Description of Artificial Sequence: Synthetic oligonucleotide
aggaggaagaggggtcaggg

SEQ ID NO: 11234 - DNA, 20 bp, Artificial Sequence
  Description of Artificial Sequence: Synthetic oligonucleotide
ggaggaagaggggtcaggga

SEQ ID NO: 11235 - DNA, 20 bp, Artificial Sequence
  Description of Artificial Sequence: Synthetic oligonucleotide
gaggaagaggggtcagggac

SEQ ID NO: 11236 - DNA, 20 bp, Artificial Sequence
  Description of Artificial Sequence: Synthetic oligonucleotide
aggaagaggggtcagggacc

SEQ ID NO: 11237 - DNA, 20 bp, Artificial Sequence
  Description of Artificial Sequence: Synthetic oligonucleotide
ggaagaggggtcagggacct

SEQ ID NO: 11238 - DNA, 20 bp, Artificial Sequence
  Description of Artificial Sequence: Synthetic oligonucleotide
gaagaggggtcagggacctg

SEQ ID NO: 11239 - DNA, 20 bp, Artificial Sequence
  Description of Artificial Sequence: Synthetic oligonucleotide
aagaggggtcagggacctgg

SEQ ID NO: 11240 - DNA, 20 bp, Artificial Sequence
  Description of Artificial Sequence: Synthetic oligonucleotide
agaggggtcagggacctgga

SEQ ID NO: 11241 - DNA, 20 bp, Artificial Sequence
  Description of Artificial Sequence: Synthetic oligonucleotide
gaggggtcagggacctggag

SEQ ID NO: 11242 - DNA, 20 bp, Artificial Sequence
  Description of Artificial Sequence: Synthetic oligonucleotide
aggggtcagggacctggagc

SEQ ID NO: 11243 - DNA, 20 bp, Artificial Sequence
  Description of Artificial Sequence: Synthetic oligonucleotide
ggggtcagggacctggagca

SEQ ID NO: 11244 - DNA, 20 bp, Artificial Sequence
  Description of Artificial Sequence: Synthetic oligonucleotide
gggtcagggacctggagcat

SEQ ID NO: 11245 - DNA, 20 bp, Artificial Sequence
  Description of Artificial Sequence: Synthetic oligonucleotide
ggtcagggacctggagcatt

SEQ ID NO: 11246 - DNA, 20 bp, Artificial Sequence
  Description of Artificial Sequence: Synthetic oligonucleotide
gtcagggacctggagcattg

SEQ ID NO: 11247 - DNA, 20 bp, Artificial Sequence
  Description of Artificial Sequence: Synthetic oligonucleotide
tcagggacctggagcattgg

SEQ ID NO: 11248 - DNA, 20 bp, Artificial Sequence
  Description of Artificial Sequence: Synthetic oligonucleotide
cagggacctggagcattgga

SEQ ID NO: 11249 - DNA, 20 bp, Artificial Sequence
  Description of Artificial Sequence: Synthetic oligonucleotide
agggacctggagcattggat

SEQ ID NO: 11250 - DNA, 20 bp, Artificial Sequence
  Description of Artificial Sequence: Synthetic oligonucleotide
gggacctggagcattggatt

SEQ ID NO: 11251 - DNA, 20 bp, Artificial Sequence
  Description of Artificial Sequence: Synthetic oligonucleotide
ggacctggagcattggattt

SEQ ID NO: 11252 - DNA, 20 bp, Artificial Sequence
  Description of Artificial Sequence: Synthetic oligonucleotide
gacctggagcattggatttg

SEQ ID NO: 11253 - DNA, 20 bp, Artificial Sequence
  Description of Artificial Sequence: Synthetic oligonucleotide
acctggagcattggatttgt

SEQ ID NO: 11254 - DNA, 20 bp, Artificial Sequence
  Description of Artificial Sequence: Synthetic oligonucleotide
cctggagcattggatttgta

SEQ ID NO: 11255 - DNA, 20 bp, Artificial Sequence
  Description of Artificial Sequence: Synthetic oligonucleotide
ctggagcattggatttgtaa

SEQ ID NO: 11256 - DNA, 20 bp, Artificial Sequence
  Description of Artificial Sequence: Synthetic oligonucleotide
tggagcattggatttgtaag

SEQ ID NO: 11257 - DNA, 20 bp, Artificial Sequence
  Description of Artificial Sequence: Synthetic oligonucleotide
ggagcattggatttgtaaga

SEQ ID NO: 11258 - DNA, 20 bp, Artificial Sequence
  Description of Artificial Sequence: Synthetic oligonucleotide
gagcattggatttgtaagat

SEQ ID NO: 11259 - DNA, 20 bp, Artificial Sequence
  Description of Artificial Sequence: Synthetic oligonucleotide
agcattggatttgtaagata

SEQ ID NO: 11260 - DNA, 20 bp, Artificial Sequence
  Description of Artificial Sequence: Synthetic oligonucleotide
gcattggatttgtaagatac

SEQ ID NO: 11261 - DNA, 20 bp, Artificial Sequence
  Description of Artificial Sequence: Synthetic oligonucleotide
cattggatttgtaagataca

SEQ ID NO: 11262 - DNA, 20 bp, Artificial Sequence
  Description of Artificial Sequence: Synthetic oligonucleotide
attggatttgtaagatacaa

SEQ ID NO: 11263 - DNA, 20 bp, Artificial Sequence
  Description of Artificial Sequence: Synthetic oligonucleotide
ttggatttgtaagatacaag

SEQ ID NO: 11264 - DNA, 20 bp, Artificial Sequence
  Description of Artificial Sequence: Synthetic oligonucleotide
tggatttgtaagatacaaga

SEQ ID NO: 11265 - DNA, 20 bp, Artificial Sequence
  Description of Artificial Sequence: Synthetic oligonucleotide
ggatttgtaagatacaagag

SEQ ID NO: 11266 - DNA, 20 bp, Artificial Sequence
  Description of Artificial Sequence: Synthetic oligonucleotide
gatttgtaagatacaagagt

SEQ ID NO: 11267 - DNA, 20 bp, Artificial Sequence
  Description of Artificial Sequence: Synthetic oligonucleotide
atttgtaagatacaagagtg

SEQ ID NO: 11268 - DNA, 20 bp, Artificial Sequence
  Description of Artificial Sequence: Synthetic oligonucleotide
tttgtaagatacaagagtgt

SEQ ID NO: 11269 - DNA, 20 bp, Artificial Sequence
  Description of Artificial Sequence: Synthetic oligonucleotide
ttgtaagatacaagagtgtt

SEQ ID NO: 11270 - DNA, 20 bp, Artificial Sequence
  Description of Artificial Sequence: Synthetic oligonucleotide
tgtaagatacaagagtgttt

SEQ ID NO: 11271 - DNA, 20 bp, Artificial Sequence
  Description of Artificial Sequence: Synthetic oligonucleotide
gtaagatacaagagtgtttc

SEQ ID NO: 11272 - DNA, 20 bp, Artificial Sequence
  Description of Artificial Sequence: Synthetic oligonucleotide
taagatacaagagtgtttct

SEQ ID NO: 11273 - DNA, 20 bp, Artificial Sequence
  Description of Artificial Sequence: Synthetic oligonucleotide
aagatacaagagtgtttctg

SEQ ID NO: 11274 - DNA, 20 bp, Artificial Sequence
  Description of Artificial Sequence: Synthetic oligonucleotide
agatacaagagtgtttctgg

SEQ ID NO: 11275 - DNA, 20 bp, Artificial Sequence
  Description of Artificial Sequence: Synthetic oligonucleotide
gatacaagagtgtttctggt

SEQ ID NO: 11276 - DNA, 20 bp, Artificial Sequence
  Description of Artificial Sequence: Synthetic oligonucleotide
atacaagagtgtttctggtc

SEQ ID NO: 11277 - DNA, 20 bp, Artificial Sequence
  Description of Artificial Sequence: Synthetic oligonucleotide
tacaagagtgtttctggtct

SEQ ID NO: 11278 - DNA, 20 bp, Artificial Sequence
  Description of Artificial Sequence: Synthetic oligonucleotide
acaagagtgtttctggtctg

SEQ ID NO: 11279 - DNA, 20 bp, Artificial Sequence
  Description of Artificial Sequence: Synthetic oligonucleotide
caagagtgtttctggtctgg

SEQ ID NO: 11280 - DNA, 20 bp, Artificial Sequence
  Description of Artificial Sequence: Synthetic oligonucleotide
aagagtgtttctggtctggg

SEQ ID NO: 11281 - DNA, 20 bp, Artificial Sequence
  Description of Artificial Sequence: Synthetic oligonucleotide
agagtgtttctggtctggga

SEQ ID NO: 11282 - DNA, 20 bp, Artificial Sequence
  Description of Artificial Sequence: Synthetic oligonucleotide
gagtgtttctggtctgggag

SEQ ID NO: 11283 - DNA, 20 bp, Artificial Sequence
  Description of Artificial Sequence: Synthetic oligonucleotide
agtgtttctggtctgggagc

SEQ ID NO: 11284 - DNA, 20 bp, Artificial Sequence
  Description of Artificial Sequence: Synthetic oligonucleotide
gtgtttctggtctgggagct

SEQ ID NO: 11285 - DNA, 20 bp, Artificial Sequence
  Description of Artificial Sequence: Synthetic oligonucleotide
tgtttctggtctgggagctg

SEQ ID NO: 11286 - DNA, 20 bp, Artificial Sequence
  Description of Artificial Sequence: Synthetic oligonucleotide
gtttctggtctgggagctgg

SEQ ID NO: 11287 - DNA, 20 bp, Artificial Sequence
  Description of Artificial Sequence: Synthetic oligonucleotide
tttctggtctgggagctggg

SEQ ID NO: 11288 - DNA, 20 bp, Artificial Sequence
  Description of Artificial Sequence: Synthetic oligonucleotide
ttctggtctgggagctgggg

SEQ ID NO: 11289 - DNA, 20 bp, Artificial Sequence
  Description of Artificial Sequence: Synthetic oligonucleotide
tctggtctgggagctggggg

SEQ ID NO: 11290 - DNA, 20 bp, Artificial Sequence
  Description of Artificial Sequence: Synthetic oligonucleotide
ctggtctgggagctgggggt

SEQ ID NO: 11291 - DNA, 20 bp, Artificial Sequence
  Description of Artificial Sequence: Synthetic oligonucleotide
tggtctgggagctgggggtt

SEQ ID NO: 11292 - DNA, 20 bp, Artificial Sequence
  Description of Artificial Sequence: Synthetic oligonucleotide
ggtctgggagctgggggttc

SEQ ID NO: 11293 - DNA, 20 bp, Artificial Sequence
  Description of Artificial Sequence: Synthetic oligonucleotide
gtctgggagctgggggttcc

SEQ ID NO: 11294 - DNA, 20 bp, Artificial Sequence
  Description of Artificial Sequence: Synthetic oligonucleotide
tctgggagctgggggttccc

SEQ ID NO: 11295 - DNA, 20 bp, Artificial Sequence
  Description of Artificial Sequence: Synthetic oligonucleotide
ctgggagctgggggttccca

SEQ ID NO: 11296 - DNA, 20 bp, Artificial Sequence
  Description of Artificial Sequence: Synthetic oligonucleotide
tgggagctgggggttcccag

SEQ ID NO: 11297 - DNA, 20 bp, Artificial Sequence
  Description of Artificial Sequence: Synthetic oligonucleotide
gggagctgggggttcccagc

SEQ ID NO: 11298 - DNA, 20 bp, Artificial Sequence
  Description of Artificial Sequence: Synthetic oligonucleotide
ggagctgggggttcccagcc

SEQ ID NO: 11299 - DNA, 20 bp, Artificial Sequence
  Description of Artificial Sequence: Synthetic oligonucleotide
gagctgggggttcccagccc

SEQ ID NO: 11300 - DNA, 20 bp, Artificial Sequence
  Description of Artificial Sequence: Synthetic oligonucleotide
agctgggggttcccagccct

SEQ ID NO: 11301 - DNA, 20 bp, Artificial Sequence
  Description of Artificial Sequence: Synthetic oligonucleotide
gctgggggttcccagcccta

SEQ ID NO: 11302 - DNA, 20 bp, Artificial Sequence
  Description of Artificial Sequence: Synthetic oligonucleotide
ctgggggttcccagccctaa

SEQ ID NO: 11303 - DNA, 20 bp, Artificial Sequence
  Description of Artificial Sequence: Synthetic oligonucleotide
tgggggttcccagccctaat

SEQ ID NO: 11304 - DNA, 20 bp, Artificial Sequence
  Description of Artificial Sequence: Synthetic oligonucleotide
gggggttcccagccctaatt

SEQ ID NO: 11305 - DNA, 20 bp, Artificial Sequence
  Description of Artificial Sequence: Synthetic oligonucleotide
ggggttcccagccctaattc

SEQ ID NO: 11306 - DNA, 20 bp, Artificial Sequence
  Description of Artificial Sequence: Synthetic oligonucleotide
gggttcccagccctaattcc

SEQ ID NO: 11307 - DNA, 20 bp, Artificial Sequence
  Description of Artificial Sequence: Synthetic oligonucleotide
ggttcccagccctaattccc

SEQ ID NO: 11308 - DNA, 20 bp, Artificial Sequence
  Description of Artificial Sequence: Synthetic oligonucleotide
gttcccagccctaattccca

SEQ ID NO: 11309 - DNA, 20 bp, Artificial Sequence
  Description of Artificial Sequence: Synthetic oligonucleotide
ttcccagccctaattcccac

SEQ ID NO: 11310 - DNA, 20 bp, Artificial Sequence
  Description of Artificial Sequence: Synthetic oligonucleotide
tcccagccctaattcccaca

SEQ ID NO: 11311 - DNA, 20 bp, Artificial Sequence
  Description of Artificial Sequence: Synthetic oligonucleotide
cccagccctaattcccacat

SEQ ID NO: 11312 - DNA, 20 bp, Artificial Sequence
  Description of Artificial Sequence: Synthetic oligonucleotide
ccagccctaattcccacata

SEQ ID NO: 11313 - DNA, 20 bp, Artificial Sequence
  Description of Artificial Sequence: Synthetic oligonucleotide
cagccctaattcccacatac

SEQ ID NO: 11314 - DNA, 20 bp, Artificial Sequence
  Description of Artificial Sequence: Synthetic oligonucleotide
agccctaattcccacatacc

SEQ ID NO: 11315 - DNA, 20 bp, Artificial Sequence
  Description of Artificial Sequence: Synthetic oligonucleotide
gccctaattcccacataccc

SEQ ID NO: 11316 - DNA, 20 bp, Artificial Sequence
  Description of Artificial Sequence: Synthetic oligonucleotide
ccctaattcccacatacccc

SEQ ID NO: 11317 - DNA, 20 bp, Artificial Sequence
  Description of Artificial Sequence: Synthetic oligonucleotide
cctaattcccacatacccca

SEQ ID NO: 11318 - DNA, 20 bp, Artificial Sequence
  Description of Artificial Sequence: Synthetic oligonucleotide
ctaattcccacataccccaa

SEQ ID NO: 11319 - DNA, 20 bp, Artificial Sequence
  Description of Artificial Sequence: Synthetic oligonucleotide
taattcccacataccccaag

SEQ ID NO: 11320 - DNA, 20 bp, Artificial Sequence
  Description of Artificial Sequence: Synthetic oligonucleotide
aattcccacataccccaaga

SEQ ID NO: 11321 - DNA, 20 bp, Artificial Sequence
  Description of Artificial Sequence: Synthetic oligonucleotide
attcccacataccccaagac

SEQ ID NO: 11322 - DNA, 20 bp, Artificial Sequence
  Description of Artificial Sequence: Synthetic oligonucleotide
ttcccacataccccaagaca

SEQ ID NO: 11323 - DNA, 20 bp, Artificial Sequence
  Description of Artificial Sequence: Synthetic oligonucleotide
tcccacataccccaagacat

SEQ ID NO: 11324 - DNA, 20 bp, Artificial Sequence
  Description of Artificial Sequence: Synthetic oligonucleotide
cccacataccccaagacatt

SEQ ID NO: 11325 - DNA, 20 bp, Artificial Sequence
  Description of Artificial Sequence: Synthetic oligonucleotide
ccacataccccaagacattg

SEQ ID NO: 11326 - DNA, 20 bp, Artificial Sequence
  Description of Artificial Sequence: Synthetic oligonucleotide
cacataccccaagacattgt

SEQ ID NO: 11327 - DNA, 20 bp, Artificial Sequence
  Description of Artificial Sequence: Synthetic oligonucleotide
acataccccaagacattgtg

SEQ ID NO: 11328 - DNA, 20 bp, Artificial Sequence
  Description of Artificial Sequence: Synthetic oligonucleotide
cataccccaagacattgtgg

SEQ ID NO: 11329 - DNA, 20 bp, Artificial Sequence
  Description of Artificial Sequence: Synthetic oligonucleotide
ataccccaagacattgtgga

SEQ ID NO: 11330 - DNA, 20 bp, Artificial Sequence
  Description of Artificial Sequence: Synthetic oligonucleotide
taccccaagacattgtggag

SEQ ID NO: 11331 - DNA, 20 bp, Artificial Sequence
  Description of Artificial Sequence: Synthetic oligonucleotide
accccaagacattgtggagg

SEQ ID NO: 11332 - DNA, 20 bp, Artificial Sequence
  Description of Artificial Sequence: Synthetic oligonucleotide
ccccaagacattgtggaggg

SEQ ID NO: 11333 - DNA, 20 bp, Artificial Sequence
  Description of Artificial Sequence: Synthetic oligonucleotide
cccaagacattgtggagggc

SEQ ID NO: 11334 - DNA, 20 bp, Artificial Sequence
  Description of Artificial Sequence: Synthetic oligonucleotide
ccaagacattgtggagggcc

SEQ ID NO: 11335 - DNA, 20 bp, Artificial Sequence
  Description of Artificial Sequence: Synthetic oligonucleotide
caagacattgtggagggccc

SEQ ID NO: 11336 - DNA, 20 bp, Artificial Sequence
  Description of Artificial Sequence: Synthetic oligonucleotide
aagacattgtggagggccca

SEQ ID NO: 11337 - DNA, 20 bp, Artificial Sequence
  Description of Artificial Sequence: Synthetic oligonucleotide
agacattgtggagggcccaa

SEQ ID NO: 11338 - DNA, 20 bp, Artificial Sequence
  Description of Artificial Sequence: Synthetic oligonucleotide
gacattgtggagggcccaaa

SEQ ID NO: 11339 - DNA, 20 bp, Artificial Sequence
  Description of Artificial Sequence: Synthetic oligonucleotide
acattgtggagggcccaaat

SEQ ID NO: 11340 - DNA, 20 bp, Artificial Sequence
  Description of Artificial Sequence: Synthetic oligonucleotide
cattgtggagggcccaaatc

SEQ ID NO: 11341 - DNA, 20 bp, Artificial Sequence
  Description of Artificial Sequence: Synthetic oligonucleotide
attgtggagggcccaaatct

SEQ ID NO: 11342 - DNA, 20 bp, Artificial Sequence
  Description of Artificial Sequence: Synthetic oligonucleotide
ttgtggagggcccaaatcta

SEQ ID NO: 11343 - DNA, 20 bp, Artificial Sequence
  Description of Artificial Sequence: Synthetic oligonucleotide
tgtggagggcccaaatctac

SEQ ID NO: 11344 - DNA, 20 bp, Artificial Sequence
  Description of Artificial Sequence: Synthetic oligonucleotide
gtggagggcccaaatctaca

SEQ ID NO: 11345 - DNA, 20 bp, Artificial Sequence
  Description of Artificial Sequence: Synthetic oligonucleotide
tggagggcccaaatctacaa

SEQ ID NO: 11346 - DNA, 20 bp, Artificial Sequence
  Description of Artificial Sequence: Synthetic oligonucleotide
ggagggcccaaatctacaaa

SEQ ID NO: 11347 - DNA, 20 bp, Artificial Sequence
  Description of Artificial Sequence: Synthetic oligonucleotide
gagggcccaaatctacaaac

SEQ ID NO: 11348 - DNA, 20 bp, Artificial Sequence
  Description of Artificial Sequence: Synthetic oligonucleotide
agggcccaaatctacaaaca

SEQ ID NO: 11349 - DNA, 20 bp, Artificial Sequence
  Description of Artificial Sequence: Synthetic oligonucleotide
gggcccaaatctacaaacac

SEQ ID NO: 11350 - DNA, 20 bp, Artificial Sequence
  Description of Artificial Sequence: Synthetic oligonucleotide
ggcccaaatctacaaacact

SEQ ID NO: 11351 - DNA, 20 bp, Artificial Sequence
  Description of Artificial Sequence: Synthetic oligonucleotide
gcccaaatctacaaacacta

SEQ ID NO: 11352 - DNA, 20 bp, Artificial Sequence
  Description of Artificial Sequence: Synthetic oligonucleotide
cccaaatctacaaacactac

SEQ ID NO: 11353 - DNA, 20 bp, Artificial Sequence
  Description of Artificial Sequence: Synthetic oligonucleotide
ccaaatctacaaacactact

SEQ ID NO: 11354 - DNA, 20 bp, Artificial Sequence
  Description of Artificial Sequence: Synthetic oligonucleotide
caaatctacaaacactacta

SEQ ID NO: 11355 - DNA, 20 bp, Artificial Sequence
  Description of Artificial Sequence: Synthetic oligonucleotide
aaatctacaaacactactac

SEQ ID NO: 11356 - DNA, 20 bp, Artificial Sequence
  Description of Artificial Sequence: Synthetic oligonucleotide
aatctacaaacactactacc

SEQ ID NO: 11357 - DNA, 20 bp, Artificial Sequence
  Description of Artificial Sequence: Synthetic oligonucleotide
atctacaaacactactacct

SEQ ID NO: 11358 - DNA, 20 bp, Artificial Sequence
  Description of Artificial Sequence: Synthetic oligonucleotide
tctacaaacactactacctg

SEQ ID NO: 11359 - DNA, 20 bp, Artificial Sequence
  Description of Artificial Sequence: Synthetic oligonucleotide
ctacaaacactactacctgg

SEQ ID NO: 11360 - DNA, 20 bp, Artificial Sequence
  Description of Artificial Sequence: Synthetic oligonucleotide
tacaaacactactacctggc

SEQ ID NO: 11361 - DNA, 20 bp, Artificial Sequence
  Description of Artificial Sequence: Synthetic oligonucleotide
acaaacactactacctggca

SEQ ID NO: 11362 - DNA, 20 bp, Artificial Sequence
  Description of Artificial Sequence: Synthetic oligonucleotide
caaacactactacctggcac

SEQ ID NO: 11363 - DNA, 20 bp, Artificial Sequence
  Description of Artificial Sequence: Synthetic oligonucleotide
aaacactactacctggcacc

SEQ ID NO: 11364 - DNA, 20 bp, Artificial Sequence
  Description of Artificial Sequence: Synthetic oligonucleotide
aacactactacctggcaccc

SEQ ID NO: 11365 - DNA, 20 bp, Artificial Sequence
  Description of Artificial Sequence: Synthetic oligonucleotide
acactactacctggcacccc

SEQ ID NO: 11366 - DNA, 20 bp, Artificial Sequence
  Description of Artificial Sequence: Synthetic oligonucleotide
cactactacctggcaccccc

SEQ ID NO: 11367 - DNA, 20 bp, Artificial Sequence
  Description of Artificial Sequence: Synthetic oligonucleotide
actactacctggcaccccct

SEQ ID NO: 11368 - DNA, 20 bp, Artificial Sequence
  Description of Artificial Sequence: Synthetic oligonucleotide
ctactacctggcaccccctc

SEQ ID NO: 11369 - DNA, 20 bp, Artificial Sequence
  Description of Artificial Sequence: Synthetic oligonucleotide
tactacctggcaccccctcc

SEQ ID NO: 11370 - DNA, 20 bp, Artificial Sequence
  Description of Artificial Sequence: Synthetic oligonucleotide
actacctggcaccccctcct

SEQ ID NO: 11371 - DNA, 20 bp, Artificial Sequence
  Description of Artificial Sequence: Synthetic oligonucleotide
ctacctggcaccccctcctc

SEQ ID NO: 11372 - DNA, 20 bp, Artificial Sequence
  Description of Artificial Sequence: Synthetic oligonucleotide
tacctggcaccccctcctcc

SEQ ID NO: 11373 - DNA, 20 bp, Artificial Sequence
  Description of Artificial Sequence: Synthetic oligonucleotide
acctggcaccccctcctcca

SEQ ID NO: 11374 - DNA, 20 bp, Artificial Sequence
  Description of Artificial Sequence: Synthetic oligonucleotide
cctggcaccccctcctccat

SEQ ID NO: 11375 - DNA, 20 bp, Artificial Sequence
  Description of Artificial Sequence: Synthetic oligonucleotide
ctggcaccccctcctccatg

SEQ ID NO: 11376 - DNA, 20 bp, Artificial Sequence
  Description of Artificial Sequence: Synthetic oligonucleotide
tggcaccccctcctccatga

SEQ ID NO: 11377 - DNA, 20 bp, Artificial Sequence
  Description of Artificial Sequence: Synthetic oligonucleotide
ggcaccccctcctccatgac

SEQ ID NO: 11378 - DNA, 20 bp, Artificial Sequence
  Description of Artificial Sequence: Synthetic oligonucleotide
gcaccccctcctccatgaca

SEQ ID NO: 11379 - DNA, 20 bp, Artificial Sequence
  Description of Artificial Sequence: Synthetic oligonucleotide
caccccctcctccatgacac

SEQ ID NO: 11380 - DNA, 20 bp, Artificial Sequence
  Description of Artificial Sequence: Synthetic oligonucleotide
accccctcctccatgacacc

SEQ ID NO: 11381 - DNA, 20 bp, Artificial Sequence
  Description of Artificial Sequence: Synthetic oligonucleotide
ccccctcctccatgacaccc

SEQ ID NO: 11382 - DNA, 20 bp, Artificial Sequence
  Description of Artificial Sequence: Synthetic oligonucleotide
cccctcctccatgacaccct

SEQ ID NO: 11383 - DNA, 20 bp, Artificial Sequence
  Description of Artificial Sequence: Synthetic oligonucleotide
ccctcctccatgacaccctc

SEQ ID NO: 11384 - DNA, 20 bp, Artificial Sequence
  Description of Artificial Sequence: Synthetic oligonucleotide
cctcctccatgacaccctcc

SEQ ID NO: 11385 - DNA, 20 bp, Artificial Sequence
  Description of Artificial Sequence: Synthetic oligonucleotide
ctcctccatgacaccctccc

SEQ ID NO: 11386 - DNA, 20 bp, Artificial Sequence
  Description of Artificial Sequence: Synthetic oligonucleotide
tcctccatgacaccctcccc

SEQ ID NO: 11387 - DNA, 20 bp, Artificial Sequence
  Description of Artificial Sequence: Synthetic oligonucleotide
cctccatgacaccctcccct

SEQ ID NO: 11388 - DNA, 20 bp, Artificial Sequence
  Description of Artificial Sequence: Synthetic oligonucleotide
ctccatgacaccctccccta

SEQ ID NO: 11389 - DNA, 20 bp, Artificial Sequence
  Description of Artificial Sequence: Synthetic oligonucleotide
tccatgacaccctcccctag

SEQ ID NO: 11390 - DNA, 20 bp, Artificial Sequence
  Description of Artificial Sequence: Synthetic oligonucleotide
ccatgacaccctcccctaga

SEQ ID NO: 11391 - DNA, 20 bp, Artificial Sequence
  Description of Artificial Sequence: Synthetic oligonucleotide
catgacaccctcccctagaa

SEQ ID NO: 11392 - DNA, 20 bp, Artificial Sequence
  Description of Artificial Sequence: Synthetic oligonucleotide
atgacaccctcccctagaag

SEQ ID NO: 11393 - DNA, 20 bp, Artificial Sequence
  Description of Artificial Sequence: Synthetic oligonucleotide
tgacaccctcccctagaagg

SEQ ID NO: 11394 - DNA, 20 bp, Artificial Sequence
  Description of Artificial Sequence: Synthetic oligonucleotide
gacaccctcccctagaaggt

SEQ ID NO: 11395 - DNA, 20 bp, Artificial Sequence
  Description of Artificial Sequence: Synthetic oligonucleotide
acaccctcccctagaaggtt

SEQ ID NO: 11396 - DNA, 20 bp, Artificial Sequence
  Description of Artificial Sequence: Synthetic oligonucleotide
caccctcccctagaaggttc

SEQ ID NO: 11397 - DNA, 20 bp, Artificial Sequence
  Description of Artificial Sequence: Synthetic oligonucleotide
accctcccctagaaggttct

SEQ ID NO: 11398 - DNA, 20 bp, Artificial Sequence
  Description of Artificial Sequence: Synthetic oligonucleotide
ccctcccctagaaggttcta

SEQ ID NO: 11399 - DNA, 20 bp, Artificial Sequence
  Description of Artificial Sequence: Synthetic oligonucleotide
cctcccctagaaggttctaa

SEQ ID NO: 11400 - DNA, 20 bp, Artificial Sequence
  Description of Artificial Sequence: Synthetic oligonucleotide
ctcccctagaaggttctaac

SEQ ID NO: 11401 - DNA, 20 bp, Artificial Sequence
  Description of Artificial Sequence: Synthetic oligonucleotide
tcccctagaaggttctaacc

SEQ ID NO: 11402 - DNA, 20 bp, Artificial Sequence
  Description of Artificial Sequence: Synthetic oligonucleotide
cccctagaaggttctaacct

SEQ ID NO: 11403 - DNA, 20 bp, Artificial Sequence
  Description of Artificial Sequence: Synthetic oligonucleotide
ccctagaaggttctaacctt

SEQ ID NO: 11404 - DNA, 20 bp, Artificial Sequence
  Description of Artificial Sequence: Synthetic oligonucleotide
cctagaaggttctaaccttc

SEQ ID NO: 11405 - DNA, 20 bp, Artificial Sequence
  Description of Artificial Sequence: Synthetic oligonucleotide
ctagaaggttctaaccttca

SEQ ID NO: 11406 - DNA, 20 bp, Artificial Sequence
  Description of Artificial Sequence: Synthetic oligonucleotide
tagaaggttctaaccttcag

SEQ ID NO: 11407 - DNA, 20 bp, Artificial Sequence
  Description of Artificial Sequence: Synthetic oligonucleotide
agaaggttctaaccttcagg

SEQ ID NO: 11408 - DNA, 20 bp, Artificial Sequence
  Description of Artificial Sequence: Synthetic oligonucleotide
gaaggttctaaccttcagga

SEQ ID NO: 11409 - DNA, 20 bp, Artificial Sequence
  Description of Artificial Sequence: Synthetic oligonucleotide
aaggttctaaccttcaggat

SEQ ID NO: 11410 - DNA, 20 bp, Artificial Sequence
  Description of Artificial Sequence: Synthetic oligonucleotide
aggttctaaccttcaggatg

SEQ ID NO: 11411 - DNA, 20 bp, Artificial Sequence
  Description of Artificial Sequence: Synthetic oligonucleotide
ggttctaaccttcaggatgg

SEQ ID NO: 11412 - DNA, 20 bp, Artificial Sequence
  Description of Artificial Sequence: Synthetic oligonucleotide
gttctaaccttcaggatggc

SEQ ID NO: 11413 - DNA, 20 bp, Artificial Sequence
  Description of Artificial Sequence: Synthetic oligonucleotide
ttctaaccttcaggatggca

SEQ ID NO: 11414 - DNA, 20 bp, Artificial Sequence
  Description of Artificial Sequence: Synthetic oligonucleotide
tctaaccttcaggatggcac

SEQ ID NO: 11415 - DNA, 20 bp, Artificial Sequence
  Description of Artificial Sequence: Synthetic oligonucleotide
ctaaccttcaggatggcacc

SEQ ID NO: 11416 - DNA, 20 bp, Artificial Sequence
  Description of Artificial Sequence: Synthetic oligonucleotide
taaccttcaggatggcaccc

SEQ ID NO: 11417 - DNA, 20 bp, Artificial Sequence
  Description of Artificial Sequence: Synthetic oligonucleotide
aaccttcaggatggcacccc

SEQ ID NO: 11418 - DNA, 20 bp, Artificial Sequence
  Description of Artificial Sequence: Synthetic oligonucleotide
accttcaggatggcaccccg

SEQ ID NO: 11419 - DNA, 20 bp, Artificial Sequence
  Description of Artificial Sequence: Synthetic oligonucleotide
ccttcaggatggcaccccga

SEQ ID NO: 11420 - DNA, 20 bp, Artificial Sequence
  Description of Artificial Sequence: Synthetic oligonucleotide
cttcaggatggcaccccgaa

SEQ ID NO: 11421 - DNA, 20 bp, Artificial Sequence
  Description of Artificial Sequence: Synthetic oligonucleotide
ttcaggatggcaccccgaac

SEQ ID NO: 11422 - DNA, 20 bp, Artificial Sequence
  Description of Artificial Sequence: Synthetic oligonucleotide
tcaggatggcaccccgaacc

SEQ ID NO: 11423 - DNA, 20 bp, Artificial Sequence
  Description of Artificial Sequence: Synthetic oligonucleotide
caggatggcaccccgaaccc

SEQ ID NO: 11424 - DNA, 20 bp, Artificial Sequence
  Description of Artificial Sequence: Synthetic oligonucleotide
aggatggcaccccgaacccc

SEQ ID NO: 11425 - DNA, 20 bp, Artificial Sequence
  Description of Artificial Sequence: Synthetic oligonucleotide
ggatggcaccccgaacccca

SEQ ID NO: 11426 - DNA, 20 bp, Artificial Sequence
  Description of Artificial Sequence: Synthetic oligonucleotide
gatggcaccccgaaccccat

SEQ ID NO: 11427 - DNA, 20 bp, Artificial Sequence
  Description of Artificial Sequence: Synthetic oligonucleotide
atggcaccccgaaccccatt

SEQ ID NO: 11428 - DNA, 20 bp, Artificial Sequence
  Description of Artificial Sequence: Synthetic oligonucleotide
tggcaccccgaaccccattt

SEQ ID NO: 11429 - DNA, 20 bp, Artificial Sequence
  Description of Artificial Sequence: Synthetic oligonucleotide
ggcaccccgaaccccatttc

SEQ ID NO: 11430 - DNA, 20 bp, Artificial Sequence
  Description of Artificial Sequence: Synthetic oligonucleotide
gcaccccgaaccccatttct

SEQ ID NO: 11431 - DNA, 20 bp, Artificial Sequence
  Description of Artificial Sequence: Synthetic oligonucleotide
caccccgaaccccatttcta

SEQ ID NO: 11432 - DNA, 20 bp, Artificial Sequence
  Description of Artificial Sequence: Synthetic oligonucleotide
accccgaaccccatttctac

SEQ ID NO: 11433 - DNA, 20 bp, Artificial Sequence
  Description of Artificial Sequence: Synthetic oligonucleotide
ccccgaaccccatttctacc

SEQ ID NO: 11434 - DNA, 20 bp, Artificial Sequence
  Description of Artificial Sequence: Synthetic oligonucleotide
cccgaaccccatttctacct

SEQ ID NO: 11435 - DNA, 20 bp, Artificial Sequence
  Description of Artificial Sequence: Synthetic oligonucleotide
ccgaaccccatttctacctt

SEQ ID NO: 11436 - DNA, 20 bp, Artificial Sequence
  Description of Artificial Sequence: Synthetic oligonucleotide
cgaaccccatttctaccttc

SEQ ID NO: 11437 - DNA, 20 bp, Artificial Sequence
  Description of Artificial Sequence: Synthetic oligonucleotide
gaaccccatttctaccttct

SEQ ID NO: 11438 - DNA, 20 bp, Artificial Sequence
  Description of Artificial Sequence: Synthetic oligonucleotide
aaccccatttctaccttctc

SEQ ID NO: 11439 - DNA, 20 bp, Artificial Sequence
  Description of Artificial Sequence: Synthetic oligonucleotide
accccatttctaccttctcc

SEQ ID NO: 11440 - DNA, 20 bp, Artificial Sequence
  Description of Artificial Sequence: Synthetic oligonucleotide
ccccatttctaccttctcca

SEQ ID NO: 11441 - DNA, 20 bp, Artificial Sequence
  Description of Artificial Sequence: Synthetic oligonucleotide
cccatttctaccttctccag

SEQ ID NO: 11442 - DNA, 20 bp, Artificial Sequence
  Description of Artificial Sequence: Synthetic oligonucleotide
ccatttctaccttctccagc

SEQ ID NO: 11443 - DNA, 20 bp, Artificial Sequence
  Description of Artificial Sequence: Synthetic oligonucleotide
catttctaccttctccagca

SEQ ID NO: 11444 - DNA, 20 bp, Artificial Sequence
  Description of Artificial Sequence: Synthetic oligonucleotide
atttctaccttctccagcac

SEQ ID NO: 11445 - DNA, 20 bp, Artificial Sequence
  Description of Artificial Sequence: Synthetic oligonucleotide
tttctaccttctccagcacc

SEQ ID NO: 11446 - DNA, 20 bp, Artificial Sequence
  Description of Artificial Sequence: Synthetic oligonucleotide
ttctaccttctccagcaccc

SEQ ID NO: 11447 - DNA, 20 bp, Artificial Sequence
  Description of Artificial Sequence: Synthetic oligonucleotide
tctaccttctccagcacccc

SEQ ID NO: 11448 - DNA, 20 bp, Artificial Sequence
  Description of Artificial Sequence: Synthetic oligonucleotide
ctaccttctccagcacccct

SEQ ID NO: 11449 - DNA, 20 bp, Artificial Sequence
  Description of Artificial Sequence: Synthetic oligonucleotide
taccttctccagcacccctg

SEQ ID NO: 11450 - DNA, 20 bp, Artificial Sequence
  Description of Artificial Sequence: Synthetic oligonucleotide
accttctccagcacccctgc

SEQ ID NO: 11451 - DNA, 20 bp, Artificial Sequence
  Description of Artificial Sequence: Synthetic oligonucleotide
ccttctccagcacccctgca

SEQ ID NO: 11452 - DNA, 20 bp, Artificial Sequence
  Description of Artificial Sequence: Synthetic oligonucleotide
cttctccagcacccctgcag

SEQ ID NO: 11453 - DNA, 20 bp, Artificial Sequence
  Description of Artificial Sequence: Synthetic oligonucleotide
ttctccagcacccctgcagc

SEQ ID NO: 11454 - DNA, 20 bp, Artificial Sequence
  Description of Artificial Sequence: Synthetic oligonucleotide
tctccagcacccctgcagct

SEQ ID NO: 11455 - DNA, 20 bp, Artificial Sequence
  Description of Artificial Sequence: Synthetic oligonucleotide
ctccagcacccctgcagctc

SEQ ID NO: 11456 - DNA, 20 bp, Artificial Sequence
  Description of Artificial Sequence: Synthetic oligonucleotide
tccagcacccctgcagctca

SEQ ID NO: 11457 - DNA, 20 bp, Artificial Sequence
  Description of Artificial Sequence: Synthetic oligonucleotide
ccagcacccctgcagctcaa

SEQ ID NO: 11458 - DNA, 20 bp, Artificial Sequence
  Description of Artificial Sequence: Synthetic oligonucleotide
cagcacccctgcagctcaag

SEQ ID NO: 11459 - DNA, 20 bp, Artificial Sequence
  Description of Artificial Sequence: Synthetic oligonucleotide
agcacccctgcagctcaagt

SEQ ID NO: 11460 - DNA, 20 bp, Artificial Sequence
  Description of Artificial Sequence: Synthetic oligonucleotide
gcacccctgcagctcaagtc

SEQ ID NO: 11461 - DNA, 20 bp, Artificial Sequence
  Description of Artificial Sequence: Synthetic oligonucleotide
cacccctgcagctcaagtcc

SEQ ID NO: 11462 - DNA, 20 bp, Artificial Sequence
  Description of Artificial Sequence: Synthetic oligonucleotide
acccctgcagctcaagtccc

SEQ ID NO: 11463 - DNA, 20 bp, Artificial Sequence
  Description of Artificial Sequence: Synthetic oligonucleotide
cccctgcagctcaagtccct

SEQ ID NO: 11464 - DNA, 20 bp, Artificial Sequence
  Description of Artificial Sequence: Synthetic oligonucleotide
ccctgcagctcaagtccctc

SEQ ID NO: 11465 - DNA, 20 bp, Artificial Sequence
  Description of Artificial Sequence: Synthetic oligonucleotide
cctgcagctcaagtccctca

SEQ ID NO: 11466 - DNA, 20 bp, Artificial Sequence
  Description of Artificial Sequence: Synthetic oligonucleotide
ctgcagctcaagtccctcaa

SEQ ID NO: 11467 - DNA, 20 bp, Artificial Sequence
  Description of Artificial Sequence: Synthetic oligonucleotide
tgcagctcaagtccctcaag

SEQ ID NO: 11468 - DNA, 20 bp, Artificial Sequence
  Description of Artificial Sequence: Synthetic oligonucleotide
gcagctcaagtccctcaaga

SEQ ID NO: 11469 - DNA, 20 bp, Artificial Sequence
  Description of Artificial Sequence: Synthetic oligonucleotide
cagctcaagtccctcaagac

SEQ ID NO: 11470 - DNA, 20 bp, Artificial Sequence
  Description of Artificial Sequence: Synthetic oligonucleotide
agctcaagtccctcaagacc

SEQ ID NO: 11471 - DNA, 20 bp, Artificial Sequence
  Description of Artificial Sequence: Synthetic oligonucleotide
gctcaagtccctcaagacct

SEQ ID NO: 11472 - DNA, 20 bp, Artificial Sequence
  Description of Artificial Sequence: Synthetic oligonucleotide
ctcaagtccctcaagacctc

SEQ ID NO: 11473 - DNA, 20 bp, Artificial Sequence
  Description of Artificial Sequence: Synthetic oligonucleotide
tcaagtccctcaagacctct

SEQ ID NO: 11474 - DNA, 20 bp, Artificial Sequence
  Description of Artificial Sequence: Synthetic oligonucleotide
caagtccctcaagacctctt

SEQ ID NO: 11475 - DNA, 20 bp, Artificial Sequence
  Description of Artificial Sequence: Synthetic oligonucleotide
aagtccctcaagacctcttt

SEQ ID NO: 11476 - DNA, 20 bp, Artificial Sequence
  Description of Artificial Sequence: Synthetic oligonucleotide
agtccctcaagacctctttc

SEQ ID NO: 11477 - DNA, 20 bp, Artificial Sequence
  Description of Artificial Sequence: Synthetic oligonucleotide
gtccctcaagacctctttct

SEQ ID NO: 11478 - DNA, 20 bp, Artificial Sequence
  Description of Artificial Sequence: Synthetic oligonucleotide
tccctcaagacctctttctc

SEQ ID NO: 11479 - DNA, 20 bp, Artificial Sequence
  Description of Artificial Sequence: Synthetic oligonucleotide
ccctcaagacctctttctcc

SEQ ID NO: 11480 - DNA, 20 bp, Artificial Sequence
  Description of Artificial Sequence: Synthetic oligonucleotide
cctcaagacctctttctcca

SEQ ID NO: 11481 - DNA, 20 bp, Artificial Sequence
  Description of Artificial Sequence: Synthetic oligonucleotide
ctcaagacctctttctccac

SEQ ID NO: 11482 - DNA, 20 bp, Artificial Sequence
  Description of Artificial Sequence: Synthetic oligonucleotide
tcaagacctctttctccacc

SEQ ID NO: 11483 - DNA, 20 bp, Artificial Sequence
  Description of Artificial Sequence: Synthetic oligonucleotide
caagacctctttctccacct

SEQ ID NO: 11484 - DNA, 20 bp, Artificial Sequence
  Description of Artificial Sequence: Synthetic oligonucleotide
aagacctctttctccacctc

SEQ ID NO: 11485 - DNA, 20 bp, Artificial Sequence
  Description of Artificial Sequence: Synthetic oligonucleotide
agacctctttctccacctct

SEQ ID NO: 11486 - DNA, 20 bp, Artificial Sequence
  Description of Artificial Sequence: Synthetic oligonucleotide
gacctctttctccacctctg

SEQ ID NO: 11487 - DNA, 20 bp, Artificial Sequence
  Description of Artificial Sequence: Synthetic oligonucleotide
acctctttctccacctctgt

SEQ ID NO: 11488 - DNA, 20 bp, Artificial Sequence
  Description of Artificial Sequence: Synthetic oligonucleotide
cctctttctccacctctgtt

SEQ ID NO: 11489 - DNA, 20 bp, Artificial Sequence
  Description of Artificial Sequence: Synthetic oligonucleotide
ctctttctccacctctgttc

SEQ ID NO: 11490 - DNA, 20 bp, Artificial Sequence
  Description of Artificial Sequence: Synthetic oligonucleotide
tctttctccacctctgttcc

SEQ ID NO: 11491 - DNA, 20 bp, Artificial Sequence
  Description of Artificial Sequence: Synthetic oligonucleotide
ctttctccacctctgttcca

SEQ ID NO: 11492 - DNA, 20 bp, Artificial Sequence
  Description of Artificial Sequence: Synthetic oligonucleotide
tttctccacctctgttccaa

SEQ ID NO: 11493 - DNA, 20 bp, Artificial Sequence
  Description of Artificial Sequence: Synthetic oligonucleotide
ttctccacctctgttccaat

SEQ ID NO: 11494 - DNA, 20 bp, Artificial Sequence
  Description of Artificial Sequence: Synthetic oligonucleotide
tctccacctctgttccaatc

SEQ ID NO: 11495 - DNA, 20 bp, Artificial Sequence
  Description of Artificial Sequence: Synthetic oligonucleotide
ctccacctctgttccaatca

SEQ ID NO: 11496 - DNA, 20 bp, Artificial Sequence
  Description of Artificial Sequence: Synthetic oligonucleotide
tccacctctgttccaatcag

SEQ ID NO: 11497 - DNA, 20 bp, Artificial Sequence
  Description of Artificial Sequence: Synthetic oligonucleotide
ccacctctgttccaatcagt

SEQ ID NO: 11498 - DNA, 20 bp, Artificial Sequence
  Description of Artificial Sequence: Synthetic oligonucleotide
cacctctgttccaatcagtg

SEQ ID NO: 11499 - DNA, 20 bp, Artificial Sequence
  Description of Artificial Sequence: Synthetic oligonucleotide
acctctgttccaatcagtga

SEQ ID NO: 11500 - DNA, 20 bp, Artificial Sequence
  Description of Artificial Sequence: Synthetic oligonucleotide
cctctgttccaatcagtgat

SEQ ID NO: 11501 - DNA, 20 bp, Artificial Sequence
  Description of Artificial Sequence: Synthetic oligonucleotide
ctctgttccaatcagtgatc

SEQ ID NO: 11502 - DNA, 20 bp, Artificial Sequence
  Description of Artificial Sequence: Synthetic oligonucleotide
tctgttccaatcagtgatca

SEQ ID NO: 11503 - DNA, 20 bp, Artificial Sequence
  Description of Artificial Sequence: Synthetic oligonucleotide
ctgttccaatcagtgatcag

SEQ ID NO: 11504 - DNA, 20 bp, Artificial Sequence
  Description of Artificial Sequence: Synthetic oligonucleotide
tgttccaatcagtgatcagc

SEQ ID NO: 11505 - DNA, 20 bp, Artificial Sequence
  Description of Artificial Sequence: Synthetic oligonucleotide
gttccaatcagtgatcagca

SEQ ID NO: 11506 - DNA, 20 bp, Artificial Sequence
  Description of Artificial Sequence: Synthetic oligonucleotide
ttccaatcagtgatcagcag

SEQ ID NO: 11507 - DNA, 20 bp, Artificial Sequence
  Description of Artificial Sequence: Synthetic oligonucleotide
tccaatcagtgatcagcagg

SEQ ID NO: 11508 - DNA, 20 bp, Artificial Sequence
  Description of Artificial Sequence: Synthetic oligonucleotide
ccaatcagtgatcagcaggg

SEQ ID NO: 11509 - DNA, 20 bp, Artificial Sequence
  Description of Artificial Sequence: Synthetic oligonucleotide
caatcagtgatcagcagggc

SEQ ID NO: 11510 - DNA, 20 bp, Artificial Sequence
  Description of Artificial Sequence: Synthetic oligonucleotide
aatcagtgatcagcagggct

SEQ ID NO: 11511 - DNA, 20 bp, Artificial Sequence
  Description of Artificial Sequence: Synthetic oligonucleotide
atcagtgatcagcagggctt

SEQ ID NO: 11512 - DNA, 20 bp, Artificial Sequence
  Description of Artificial Sequence: Synthetic oligonucleotide
tcagtgatcagcagggcttc

SEQ ID NO: 11513 - DNA, 20 bp, Artificial Sequence
  Description of Artificial Sequence: Synthetic oligonucleotide
cagtgatcagcagggcttca

SEQ ID NO: 11514 - DNA, 20 bp, Artificial Sequence
  Description of Artificial Sequence: Synthetic oligonucleotide
agtgatcagcagggcttcag

SEQ ID NO: 11515 - DNA, 20 bp, Artificial Sequence
  Description of Artificial Sequence: Synthetic oligonucleotide
gtgatcagcagggcttcagg

SEQ ID NO: 11516 - DNA, 20 bp, Artificial Sequence
  Description of Artificial Sequence: Synthetic oligonucleotide
tgatcagcagggcttcaggg

SEQ ID NO: 11517 - DNA, 20 bp, Artificial Sequence
  Description of Artificial Sequence: Synthetic oligonucleotide
gatcagcagggcttcaggga

SEQ ID NO: 11518 - DNA, 20 bp, Artificial Sequence
  Description of Artificial Sequence: Synthetic oligonucleotide
atcagcagggcttcagggac

SEQ ID NO: 11519 - DNA, 20 bp, Artificial Sequence
  Description of Artificial Sequence: Synthetic oligonucleotide
tcagcagggcttcagggaca

SEQ ID NO: 11520 - DNA, 20 bp, Artificial Sequence
  Description of Artificial Sequence: Synthetic oligonucleotide
cagcagggcttcagggacag

SEQ ID NO: 11521 - DNA, 20 bp, Artificial Sequence
  Description of Artificial Sequence: Synthetic oligonucleotide
agcagggcttcagggacagc

SEQ ID NO: 11522 - DNA, 20 bp, Artificial Sequence
  Description of Artificial Sequence: Synthetic oligonucleotide
gcagggcttcagggacagcc

SEQ ID NO: 11523 - DNA, 20 bp, Artificial Sequence
  Description of Artificial Sequence: Synthetic oligonucleotide
cagggcttcagggacagccc

SEQ ID NO: 11524 - DNA, 20 bp, Artificial Sequence
  Description of Artificial Sequence: Synthetic oligonucleotide
agggcttcagggacagccca

SEQ ID NO: 11525 - DNA, 20 bp, Artificial Sequence
  Description of Artificial Sequence: Synthetic oligonucleotide
gggcttcagggacagcccac

SEQ ID NO: 11526 - DNA, 20 bp, Artificial Sequence
  Description of Artificial Sequence: Synthetic oligonucleotide
ggcttcagggacagcccact

SEQ ID NO: 11527 - DNA, 20 bp, Artificial Sequence
  Description of Artificial Sequence: Synthetic oligonucleotide
gcttcagggacagcccactg

SEQ ID NO: 11528 - DNA, 20 bp, Artificial Sequence
  Description of Artificial Sequence: Synthetic oligonucleotide
cttcagggacagcccactgg

SEQ ID NO: 11529 - DNA, 20 bp, Artificial Sequence
  Description of Artificial Sequence: Synthetic oligonucleotide
ttcagggacagcccactggc

SEQ ID NO: 11530 - DNA, 20 bp, Artificial Sequence
  Description of Artificial Sequence: Synthetic oligonucleotide
tcagggacagcccactggct

SEQ ID NO: 11531 - DNA, 20 bp, Artificial Sequence
  Description of Artificial Sequence: Synthetic oligonucleotide
cagggacagcccactggctt

SEQ ID NO: 11532 - DNA, 20 bp, Artificial Sequence
  Description of Artificial Sequence: Synthetic oligonucleotide
agggacagcccactggcttg

SEQ ID NO: 11533 - DNA, 20 bp, Artificial Sequence
  Description of Artificial Sequence: Synthetic oligonucleotide
gggacagcccactggcttgc

SEQ ID NO: 11534 - DNA, 20 bp, Artificial Sequence
  Description of Artificial Sequence: Synthetic oligonucleotide
ggacagcccactggcttgca

SEQ ID NO: 11535 - DNA, 20 bp, Artificial Sequence
  Description of Artificial Sequence: Synthetic oligonucleotide
gacagcccactggcttgcag

SEQ ID NO: 11536 - DNA, 20 bp, Artificial Sequence
  Description of Artificial Sequence: Synthetic oligonucleotide
acagcccactggcttgcaga

SEQ ID NO: 11537 - DNA, 20 bp, Artificial Sequence
  Description of Artificial Sequence: Synthetic oligonucleotide
cagcccactggcttgcagag

SEQ ID NO: 11538 - DNA, 20 bp, Artificial Sequence
  Description of Artificial Sequence: Synthetic oligonucleotide
agcccactggcttgcagagg

SEQ ID NO: 11539 - DNA, 20 bp, Artificial Sequence
  Description of Artificial Sequence: Synthetic oligonucleotide
gcccactggcttgcagagga

SEQ ID NO: 11540 - DNA, 20 bp, Artificial Sequence
  Description of Artificial Sequence: Synthetic oligonucleotide
cccactggcttgcagaggag

SEQ ID NO: 11541 - DNA, 20 bp, Artificial Sequence
  Description of Artificial Sequence: Synthetic oligonucleotide
ccactggcttgcagaggaga

SEQ ID NO: 11542 - DNA, 20 bp, Artificial Sequence
  Description of Artificial Sequence: Synthetic oligonucleotide
cactggcttgcagaggagaa

SEQ ID NO: 11543 - DNA, 20 bp, Artificial Sequence
  Description of Artificial Sequence: Synthetic oligonucleotide
actggcttgcagaggagaag

SEQ ID NO: 11544 - DNA, 20 bp, Artificial Sequence
  Description of Artificial Sequence: Synthetic oligonucleotide
ctggcttgcagaggagaagg

SEQ ID NO: 11545 - DNA, 20 bp, Artificial Sequence
  Description of Artificial Sequence: Synthetic oligonucleotide
tggcttgcagaggagaaggg

SEQ ID NO: 11546 - DNA, 20 bp, Artificial Sequence
  Description of Artificial Sequence: Synthetic oligonucleotide
ggcttgcagaggagaagggt

SEQ ID NO: 11547 - DNA, 20 bp, Artificial Sequence
  Description of Artificial Sequence: Synthetic oligonucleotide
gcttgcagaggagaagggtt

SEQ ID NO: 11548 - DNA, 20 bp, Artificial Sequence
  Description of Artificial Sequence: Synthetic oligonucleotide
cttgcagaggagaagggttg

SEQ ID NO: 11549 - DNA, 20 bp, Artificial Sequence
  Description of Artificial Sequence: Synthetic oligonucleotide
ttgcagaggagaagggttgg

SEQ ID NO: 11550 - DNA, 20 bp, Artificial Sequence
  Description of Artificial Sequence: Synthetic oligonucleotide
tgcagaggagaagggttggg

SEQ ID NO: 11551 - DNA, 20 bp, Artificial Sequence
  Description of Artificial Sequence: Synthetic oligonucleotide
gcagaggagaagggttgggt

SEQ ID NO: 11552 - DNA, 20 bp, Artificial Sequence
  Description of Artificial Sequence: Synthetic oligonucleotide
cagaggagaagggttgggtg

SEQ ID NO: 11553 - DNA, 20 bp, Artificial Sequence
  Description of Artificial Sequence: Synthetic oligonucleotide
agaggagaagggttgggtgg

SEQ ID NO: 11554 - DNA, 20 bp, Artificial Sequence
  Description of Artificial Sequence: Synthetic oligonucleotide
gaggagaagggttgggtggc

SEQ ID NO: 11555 - DNA, 20 bp, Artificial Sequence
  Description of Artificial Sequence: Synthetic oligonucleotide
aggagaagggttgggtggcc

SEQ ID NO: 11556 - DNA, 20 bp, Artificial Sequence
  Description of Artificial Sequence: Synthetic oligonucleotide
ggagaagggttgggtggcct

SEQ ID NO: 11557 - DNA, 20 bp, Artificial Sequence
  Description of Artificial Sequence: Synthetic oligonucleotide
gagaagggttgggtggcctg

SEQ ID NO: 11558 - DNA, 20 bp, Artificial Sequence
  Description of Artificial Sequence: Synthetic oligonucleotide
agaagggttgggtggcctgg

SEQ ID NO: 11559 - DNA, 20 bp, Artificial Sequence
  Description of Artificial Sequence: Synthetic oligonucleotide
gaagggttgggtggcctggc

SEQ ID NO: 11560 - DNA, 20 bp, Artificial Sequence
  Description of Artificial Sequence: Synthetic oligonucleotide
aagggttgggtggcctggct

SEQ ID NO: 11561 - DNA, 20 bp, Artificial Sequence
  Description of Artificial Sequence: Synthetic oligonucleotide
agggttgggtggcctggctg

SEQ ID NO: 11562 - DNA, 20 bp, Artificial Sequence
  Description of Artificial Sequence: Synthetic oligonucleotide
gggttgggtggcctggctgg

SEQ ID NO: 11563 - DNA, 20 bp, Artificial Sequence
  Description of Artificial Sequence: Synthetic oligonucleotide
ggttgggtggcctggctggg

SEQ ID NO: 11564 - DNA, 20 bp, Artificial Sequence
  Description of Artificial Sequence: Synthetic oligonucleotide
gttgggtggcctggctgggc

SEQ ID NO: 11565 - DNA, 20 bp, Artificial Sequence
  Description of Artificial Sequence: Synthetic oligonucleotide
ttgggtggcctggctgggcc

SEQ ID NO: 11566 - DNA, 20 bp, Artificial Sequence
  Description of Artificial Sequence: Synthetic oligonucleotide
tgggtggcctggctgggcca

SEQ ID NO: 11567 - DNA, 20 bp, Artificial Sequence
  Description of Artificial Sequence: Synthetic oligonucleotide
gggtggcctggctgggccag

SEQ ID NO: 11568 - DNA, 20 bp, Artificial Sequence
  Description of Artificial Sequence: Synthetic oligonucleotide
ggtggcctggctgggccagg

SEQ ID NO: 11569 - DNA, 20 bp, Artificial Sequence
  Description of Artificial Sequence: Synthetic oligonucleotide
gtggcctggctgggccaggt

SEQ ID NO: 11570 - DNA, 20 bp, Artificial Sequence
  Description of Artificial Sequence: Synthetic oligonucleotide
tggcctggctgggccaggtc

SEQ ID NO: 11571 - DNA, 20 bp, Artificial Sequence
  Description of Artificial Sequence: Synthetic oligonucleotide
ggcctggctgggccaggtca

SEQ ID NO: 11572 - DNA, 20 bp, Artificial Sequence
  Description of Artificial Sequence: Synthetic oligonucleotide
gcctggctgggccaggtcag

SEQ ID NO: 11573 - DNA, 20 bp, Artificial Sequence
  Description of Artificial Sequence: Synthetic oligonucleotide
cctggctgggccaggtcagg

SEQ ID NO: 11574 - DNA, 20 bp, Artificial Sequence
  Description of Artificial Sequence: Synthetic oligonucleotide
ctggctgggccaggtcaggg

SEQ ID NO: 11575 - DNA, 20 bp, Artificial Sequence
  Description of Artificial Sequence: Synthetic oligonucleotide
tggctgggccaggtcagggc

SEQ ID NO: 11576 - DNA, 20 bp, Artificial Sequence
  Description of Artificial Sequence: Synthetic oligonucleotide
ggctgggccaggtcagggct

SEQ ID NO: 11577 - DNA, 20 bp, Artificial Sequence
  Description of Artificial Sequence: Synthetic oligonucleotide
gctgggccaggtcagggctg

SEQ ID NO: 11578 - DNA, 20 bp, Artificial Sequence
  Description of Artificial Sequence: Synthetic oligonucleotide
ctgggccaggtcagggctga

SEQ ID NO: 11579 - DNA, 20 bp, Artificial Sequence
  Description of Artificial Sequence: Synthetic oligonucleotide
tgggccaggtcagggctgag

SEQ ID NO: 11580 - DNA, 20 bp, Artificial Sequence
  Description of Artificial Sequence: Synthetic oligonucleotide
gggccaggtcagggctgagg

SEQ ID NO: 11581 - DNA, 20 bp, Artificial Sequence
  Description of Artificial Sequence: Synthetic oligonucleotide
ggccaggtcagggctgagga

SEQ ID NO: 11582 - DNA, 20 bp, Artificial Sequence
  Description of Artificial Sequence: Synthetic oligonucleotide
gccaggtcagggctgaggaa

SEQ ID NO: 11583 - DNA, 20 bp, Artificial Sequence
  Description of Artificial Sequence: Synthetic oligonucleotide
ccaggtcagggctgaggaag

SEQ ID NO: 11584 - DNA, 20 bp, Artificial Sequence
  Description of Artificial Sequence: Synthetic oligonucleotide
caggtcagggctgaggaagg

SEQ ID NO: 11585 - DNA, 20 bp, Artificial Sequence
  Description of Artificial Sequence: Synthetic oligonucleotide
aggtcagggctgaggaagga

SEQ ID NO: 11586 - DNA, 20 bp, Artificial Sequence
  Description of Artificial Sequence: Synthetic oligonucleotide
ggtcagggctgaggaaggag

SEQ ID NO: 11587 - DNA, 20 bp, Artificial Sequence
  Description of Artificial Sequence: Synthetic oligonucleotide
gtcagggctgaggaaggagg

SEQ ID NO: 11588 - DNA, 20 bp, Artificial Sequence
  Description of Artificial Sequence: Synthetic oligonucleotide
tcagggctgaggaaggaggt

SEQ ID NO: 11589 - DNA, 20 bp, Artificial Sequence
  Description of Artificial Sequence: Synthetic oligonucleotide
cagggctgaggaaggaggtg

SEQ ID NO: 11590 - DNA, 20 bp, Artificial Sequence
  Description of Artificial Sequence: Synthetic oligonucleotide
agggctgaggaaggaggtgc

SEQ ID NO: 11591 - DNA, 20 bp, Artificial Sequence
  Description of Artificial Sequence: Synthetic oligonucleotide
gggctgaggaaggaggtgct

SEQ ID NO: 11592 - DNA, 20 bp, Artificial Sequence
  Description of Artificial Sequence: Synthetic oligonucleotide
ggctgaggaaggaggtgctc

SEQ ID NO: 11593 - DNA, 20 bp, Artificial Sequence
  Description of Artificial Sequence: Synthetic oligonucleotide
gctgaggaaggaggtgctcc

SEQ ID NO: 11594 - DNA, 20 bp, Artificial Sequence
  Description of Artificial Sequence: Synthetic oligonucleotide
ctgaggaaggaggtgctccc

SEQ ID NO: 11595 - DNA, 20 bp, Artificial Sequence
  Description of Artificial Sequence: Synthetic oligonucleotide
tgaggaaggaggtgctccca

SEQ ID NO: 11596 - DNA, 20 bp, Artificial Sequence
  Description of Artificial Sequence: Synthetic oligonucleotide
gaggaaggaggtgctcccat

SEQ ID NO: 11597 - DNA, 20 bp, Artificial Sequence
  Description of Artificial Sequence: Synthetic oligonucleotide
aggaaggaggtgctcccatc

SEQ ID NO: 11598 - DNA, 20 bp, Artificial Sequence
  Description of Artificial Sequence: Synthetic oligonucleotide
ggaaggaggtgctcccatca

SEQ ID NO: 11599 - DNA, 20 bp, Artificial Sequence
  Description of Artificial Sequence: Synthetic oligonucleotide
gaaggaggtgctcccatcag

SEQ ID NO: 11600 - DNA, 20 bp, Artificial Sequence
  Description of Artificial Sequence: Synthetic oligonucleotide
aaggaggtgctcccatcagc

SEQ ID NO: 11601 - DNA, 20 bp, Artificial Sequence
  Description of Artificial Sequence: Synthetic oligonucleotide
aggaggtgctcccatcagct

SEQ ID NO: 11602 - DNA, 20 bp, Artificial Sequence
  Description of Artificial Sequence: Synthetic oligonucleotide
ggaggtgctcccatcagctt

SEQ ID NO: 11603 - DNA, 20 bp, Artificial Sequence
  Description of Artificial Sequence: Synthetic oligonucleotide
gaggtgctcccatcagcttt

SEQ ID NO: 11604 - DNA, 20 bp, Artificial Sequence
  Description of Artificial Sequence: Synthetic oligonucleotide
aggtgctcccatcagctttg

SEQ ID NO: 11605 - DNA, 20 bp, Artificial Sequence
  Description of Artificial Sequence: Synthetic oligonucleotide
ggtgctcccatcagctttga

SEQ ID NO: 11606 - DNA, 20 bp, Artificial Sequence
  Description of Artificial Sequence: Synthetic oligonucleotide
gtgctcccatcagctttgac

SEQ ID NO: 11607 - DNA, 20 bp, Artificial Sequence
  Description of Artificial Sequence: Synthetic oligonucleotide
tgctcccatcagctttgacc

SEQ ID NO: 11608 - DNA, 20 bp, Artificial Sequence
  Description of Artificial Sequence: Synthetic oligonucleotide
gctcccatcagctttgaccc

SEQ ID NO: 11609 - DNA, 20 bp, Artificial Sequence
  Description of Artificial Sequence: Synthetic oligonucleotide
ctcccatcagctttgaccca

SEQ ID NO: 11610 - DNA, 20 bp, Artificial Sequence
  Description of Artificial Sequence: Synthetic oligonucleotide
tcccatcagctttgacccag

SEQ ID NO: 11611 - DNA, 20 bp, Artificial Sequence
  Description of Artificial Sequence: Synthetic oligonucleotide
cccatcagctttgacccaga

SEQ ID NO: 11612 - DNA, 20 bp, Artificial Sequence
  Description of Artificial Sequence: Synthetic oligonucleotide
ccatcagctttgacccagag

SEQ ID NO: 11613 - DNA, 20 bp, Artificial Sequence
  Description of Artificial Sequence: Synthetic oligonucleotide
catcagctttgacccagaga

SEQ ID NO: 11614 - DNA, 20 bp, Artificial Sequence
  Description of Artificial Sequence: Synthetic oligonucleotide
atcagctttgacccagagac

SEQ ID NO: 11615 - DNA, 20 bp, Artificial Sequence
  Description of Artificial Sequence: Synthetic oligonucleotide
tcagctttgacccagagact

SEQ ID NO: 11616 - DNA, 20 bp, Artificial Sequence
  Description of Artificial Sequence: Synthetic oligonucleotide
cagctttgacccagagactg

SEQ ID NO: 11617 - DNA, 20 bp, Artificial Sequence
  Description of Artificial Sequence: Synthetic oligonucleotide
agctttgacccagagactgg

SEQ ID NO: 11618 - DNA, 20 bp, Artificial Sequence
  Description of Artificial Sequence: Synthetic oligonucleotide
gctttgacccagagactggt

SEQ ID NO: 11619 - DNA, 20 bp, Artificial Sequence
  Description of Artificial Sequence: Synthetic oligonucleotide
ctttgacccagagactggtg

SEQ ID NO: 11620 - DNA, 20 bp, Artificial Sequence
  Description of Artificial Sequence: Synthetic oligonucleotide
tttgacccagagactggtga

SEQ ID NO: 11621 - DNA, 20 bp, Artificial Sequence
  Description of Artificial Sequence: Synthetic oligonucleotide
ttgacccagagactggtgag

SEQ ID NO: 11622 - DNA, 20 bp, Artificial Sequence
  Description of Artificial Sequence: Synthetic oligonucleotide
tgacccagagactggtgagc

SEQ ID NO: 11623 - DNA, 20 bp, Artificial Sequence
  Description of Artificial Sequence: Synthetic oligonucleotide
gacccagagactggtgagcc

SEQ ID NO: 11624 - DNA, 20 bp, Artificial Sequence
  Description of Artificial Sequence: Synthetic oligonucleotide
acccagagactggtgagccc

SEQ ID NO: 11625 - DNA, 20 bp, Artificial Sequence
  Description of Artificial Sequence: Synthetic oligonucleotide
cccagagactggtgagccct

SEQ ID NO: 11626 - DNA, 20 bp, Artificial Sequence
  Description of Artificial Sequence: Synthetic oligonucleotide
ccagagactggtgagccctc

SEQ ID NO: 11627 - DNA, 20 bp, Artificial Sequence
  Description of Artificial Sequence: Synthetic oligonucleotide
cagagactggtgagccctca

SEQ ID NO: 11628 - DNA, 20 bp, Artificial Sequence
  Description of Artificial Sequence: Synthetic oligonucleotide
agagactggtgagccctcag

SEQ ID NO: 11629 - DNA, 20 bp, Artificial Sequence
  Description of Artificial Sequence: Synthetic oligonucleotide
gagactggtgagccctcagg

SEQ ID NO: 11630 - DNA, 20 bp, Artificial Sequence
  Description of Artificial Sequence: Synthetic oligonucleotide
agactggtgagccctcaggg

SEQ ID NO: 11631 - DNA, 20 bp, Artificial Sequence
  Description of Artificial Sequence: Synthetic oligonucleotide
gactggtgagccctcaggga

SEQ ID NO: 11632 - DNA, 20 bp, Artificial Sequence
  Description of Artificial Sequence: Synthetic oligonucleotide
actggtgagccctcagggac

SEQ ID NO: 11633 - DNA, 20 bp, Artificial Sequence
  Description of Artificial Sequence: Synthetic oligonucleotide
ctggtgagccctcagggact

SEQ ID NO: 11634 - DNA, 20 bp, Artificial Sequence
  Description of Artificial Sequence: Synthetic oligonucleotide
tggtgagccctcagggactc

SEQ ID NO: 11635 - DNA, 20 bp, Artificial Sequence
  Description of Artificial Sequence: Synthetic oligonucleotide
ggtgagccctcagggactcc

SEQ ID NO: 11636 - DNA, 20 bp, Artificial Sequence
  Description of Artificial Sequence: Synthetic oligonucleotide
gtgagccctcagggactcca

SEQ ID NO: 11637 - DNA, 20 bp, Artificial Sequence
  Description of Artificial Sequence: Synthetic oligonucleotide
tgagccctcagggactccag

SEQ ID NO: 11638 - DNA, 20 bp, Artificial Sequence
  Description of Artificial Sequence: Synthetic oligonucleotide
gagccctcagggactccagg

SEQ ID NO: 11639 - DNA, 20 bp, Artificial Sequence
  Description of Artificial Sequence: Synthetic oligonucleotide
agccctcagggactccaggc

SEQ ID NO: 11640 - DNA, 20 bp, Artificial Sequence
  Description of Artificial Sequence: Synthetic oligonucleotide
gccctcagggactccaggcc

SEQ ID NO: 11641 - DNA, 20 bp, Artificial Sequence
  Description of Artificial Sequence: Synthetic oligonucleotide
ccctcagggactccaggcca

SEQ ID NO: 11642 - DNA, 20 bp, Artificial Sequence
  Description of Artificial Sequence: Synthetic oligonucleotide
cctcagggactccaggccag

SEQ ID NO: 11643 - DNA, 20 bp, Artificial Sequence
  Description of Artificial Sequence: Synthetic oligonucleotide
ctcagggactccaggccagg

SEQ ID NO: 11644 - DNA, 20 bp, Artificial Sequence
  Description of Artificial Sequence: Synthetic oligonucleotide
tcagggactccaggccagga

SEQ ID NO: 11645 - DNA, 20 bp, Artificial Sequence
  Description of Artificial Sequence: Synthetic oligonucleotide
cagggactccaggccaggac

SEQ ID NO: 11646 - DNA, 20 bp, Artificial Sequence
  Description of Artificial Sequence: Synthetic oligonucleotide
agggactccaggccaggaca

SEQ ID NO: 11647 - DNA, 20 bp, Artificial Sequence
  Description of Artificial Sequence: Synthetic oligonucleotide
gggactccaggccaggacat

SEQ ID NO: 11648 - DNA, 20 bp, Artificial Sequence
  Description of Artificial Sequence: Synthetic oligonucleotide
ggactccaggccaggacatc

SEQ ID NO: 11649 - DNA, 20 bp, Artificial Sequence
  Description of Artificial Sequence: Synthetic oligonucleotide
gactccaggccaggacatct

SEQ ID NO: 11650 - DNA, 20 bp, Artificial Sequence
  Description of Artificial Sequence: Synthetic oligonucleotide
actccaggccaggacatctt

SEQ ID NO: 11651 - DNA, 20 bp, Artificial Sequence
  Description of Artificial Sequence: Synthetic oligonucleotide
ctccaggccaggacatcttc

SEQ ID NO: 11652 - DNA, 20 bp, Artificial Sequence
  Description of Artificial Sequence: Synthetic oligonucleotide
tccaggccaggacatcttct

SEQ ID NO: 11653 - DNA, 20 bp, Artificial Sequence
  Description of Artificial Sequence: Synthetic oligonucleotide
ccaggccaggacatcttctc

SEQ ID NO: 11654 - DNA, 20 bp, Artificial Sequence
  Description of Artificial Sequence: Synthetic oligonucleotide
caggccaggacatcttctcc

SEQ ID NO: 11655 - DNA, 20 bp, Artificial Sequence
  Description of Artificial Sequence: Synthetic oligonucleotide
aggccaggacatcttctcct

SEQ ID NO: 11656 - DNA, 20 bp, Artificial Sequence
  Description of Artificial Sequence: Synthetic oligonucleotide
ggccaggacatcttctcctt

SEQ ID NO: 11657 - DNA, 20 bp, Artificial Sequence
  Description of Artificial Sequence: Synthetic oligonucleotide
gccaggacatcttctcctta

SEQ ID NO: 11658 - DNA, 20 bp, Artificial Sequence
  Description of Artificial Sequence: Synthetic oligonucleotide
ccaggacatcttctccttaa

SEQ ID NO: 11659 - DNA, 20 bp, Artificial Sequence
  Description of Artificial Sequence: Synthetic oligonucleotide
caggacatcttctccttaag

SEQ ID NO: 11660 - DNA, 20 bp, Artificial Sequence
  Description of Artificial Sequence: Synthetic oligonucleotide
aggacatcttctccttaagg

SEQ ID NO: 11661 - DNA, 20 bp, Artificial Sequence
  Description of Artificial Sequence: Synthetic oligonucleotide
ggacatcttctccttaaggt

SEQ ID NO: 11662 - DNA, 20 bp, Artificial Sequence
  Description of Artificial Sequence: Synthetic oligonucleotide
gacatcttctccttaaggtg

SEQ ID NO: 11663 - DNA, 20 bp, Artificial Sequence
  Description of Artificial Sequence: Synthetic oligonucleotide
acatcttctccttaaggtgg

SEQ ID NO: 11664 - DNA, 20 bp, Artificial Sequence
  Description of Artificial Sequence: Synthetic oligonucleotide
catcttctccttaaggtgga

SEQ ID NO: 11665 - DNA, 20 bp, Artificial Sequence
  Description of Artificial Sequence: Synthetic oligonucleotide
atcttctccttaaggtggac

SEQ ID NO: 11666 - DNA, 20 bp, Artificial Sequence
  Description of Artificial Sequence: Synthetic oligonucleotide
tcttctccttaaggtggacc

SEQ ID NO: 11667 - DNA, 20 bp, Artificial Sequence
  Description of Artificial Sequence: Synthetic oligonucleotide
cttctccttaaggtggacct

SEQ ID NO: 11668 - DNA, 20 bp, Artificial Sequence
  Description of Artificial Sequence: Synthetic oligonucleotide
ttctccttaaggtggacctg

SEQ ID NO: 11669 - DNA, 20 bp, Artificial Sequence
  Description of Artificial Sequence: Synthetic oligonucleotide
tctccttaaggtggacctga

SEQ ID NO: 11670 - DNA, 20 bp, Artificial Sequence
  Description of Artificial Sequence: Synthetic oligonucleotide
ctccttaaggtggacctgac

SEQ ID NO: 11671 - DNA, 20 bp, Artificial Sequence
  Description of Artificial Sequence: Synthetic oligonucleotide
tccttaaggtggacctgaca

SEQ ID NO: 11672 - DNA, 20 bp, Artificial Sequence
  Description of Artificial Sequence: Synthetic oligonucleotide
ccttaaggtggacctgacaa

SEQ ID NO: 11673 - DNA, 20 bp, Artificial Sequence
  Description of Artificial Sequence: Synthetic oligonucleotide
cttaaggtggacctgacaag

SEQ ID NO: 11674 - DNA, 20 bp, Artificial Sequence
  Description of Artificial Sequence: Synthetic oligonucleotide
ttaaggtggacctgacaagg

SEQ ID NO: 11675 - DNA, 20 bp, Artificial Sequence
  Description of Artificial Sequence: Synthetic oligonucleotide
taaggtggacctgacaagga

SEQ ID NO: 11676 - DNA, 20 bp, Artificial Sequence
  Description of Artificial Sequence: Synthetic oligonucleotide
aaggtggacctgacaaggag

SEQ ID NO: 11677 - DNA, 20 bp, Artificial Sequence
  Description of Artificial Sequence: Synthetic oligonucleotide
aggtggacctgacaaggaga

SEQ ID NO: 11678 - DNA, 20 bp, Artificial Sequence
  Description of Artificial Sequence: Synthetic oligonucleotide
ggtggacctgacaaggagag

SEQ ID NO: 11679 - DNA, 20 bp, Artificial Sequence
  Description of Artificial Sequence: Synthetic oligonucleotide
gtggacctgacaaggagagg

SEQ ID NO: 11680 - DNA, 20 bp, Artificial Sequence
  Description of Artificial Sequence: Synthetic oligonucleotide
tggacctgacaaggagagga

SEQ ID NO: 11681 - DNA, 20 bp, Artificial Sequence
  Description of Artificial Sequence: Synthetic oligonucleotide
ggacctgacaaggagaggac

SEQ ID NO: 11682 - DNA, 20 bp, Artificial Sequence
  Description of Artificial Sequence: Synthetic oligonucleotide
gacctgacaaggagaggacc

SEQ ID NO: 11683 - DNA, 20 bp, Artificial Sequence
  Description of Artificial Sequence: Synthetic oligonucleotide
acctgacaaggagaggacca

SEQ ID NO: 11684 - DNA, 20 bp, Artificial Sequence
  Description of Artificial Sequence: Synthetic oligonucleotide
cctgacaaggagaggaccag

SEQ ID NO: 11685 - DNA, 20 bp, Artificial Sequence
  Description of Artificial Sequence: Synthetic oligonucleotide
ctgacaaggagaggaccagc

SEQ ID NO: 11686 - DNA, 20 bp, Artificial Sequence
  Description of Artificial Sequence: Synthetic oligonucleotide
tgacaaggagaggaccagca

SEQ ID NO: 11687 - DNA, 20 bp, Artificial Sequence
  Description of Artificial Sequence: Synthetic oligonucleotide
gacaaggagaggaccagcaa

SEQ ID NO: 11688 - DNA, 20 bp, Artificial Sequence
  Description of Artificial Sequence: Synthetic oligonucleotide
acaaggagaggaccagcaat

SEQ ID NO: 11689 - DNA, 20 bp, Artificial Sequence
  Description of Artificial Sequence: Synthetic oligonucleotide
caaggagaggaccagcaatg

SEQ ID NO: 11690 - DNA, 20 bp, Artificial Sequence
  Description of Artificial Sequence: Synthetic oligonucleotide
aaggagaggaccagcaatgg

SEQ ID NO: 11691 - DNA, 20 bp, Artificial Sequence
  Description of Artificial Sequence: Synthetic oligonucleotide
aggagaggaccagcaatggc

SEQ ID NO: 11692 - DNA, 20 bp, Artificial Sequence
  Description of Artificial Sequence: Synthetic oligonucleotide
ggagaggaccagcaatggca

SEQ ID NO: 11693 - DNA, 20 bp, Artificial Sequence
  Description of Artificial Sequence: Synthetic oligonucleotide
gagaggaccagcaatggcaa

SEQ ID NO: 11694 - DNA, 20 bp, Artificial Sequence
  Description of Artificial Sequence: Synthetic oligonucleotide
agaggaccagcaatggcaag

SEQ ID NO: 11695 - DNA, 20 bp, Artificial Sequence
  Description of Artificial Sequence: Synthetic oligonucleotide
gaggaccagcaatggcaagt

SEQ ID NO: 11696 - DNA, 20 bp, Artificial Sequence
  Description of Artificial Sequence: Synthetic oligonucleotide
aggaccagcaatggcaagtg

SEQ ID NO: 11697 - DNA, 20 bp, Artificial Sequence
  Description of Artificial Sequence: Synthetic oligonucleotide
ggaccagcaatggcaagtgg

SEQ ID NO: 11698 - DNA, 20 bp, Artificial Sequence
  Description of Artificial Sequence: Synthetic oligonucleotide
gaccagcaatggcaagtggc

SEQ ID NO: 11699 - DNA, 20 bp, Artificial Sequence
  Description of Artificial Sequence: Synthetic oligonucleotide
accagcaatggcaagtggcg

SEQ ID NO: 11700 - DNA, 20 bp, Artificial Sequence
  Description of Artificial Sequence: Synthetic oligonucleotide
ccagcaatggcaagtggcgg

SEQ ID NO: 11701 - DNA, 20 bp, Artificial Sequence
  Description of Artificial Sequence: Synthetic oligonucleotide
cagcaatggcaagtggcggg

SEQ ID NO: 11702 - DNA, 20 bp, Artificial Sequence
  Description of Artificial Sequence: Synthetic oligonucleotide
agcaatggcaagtggcgggg

SEQ ID NO: 11703 - DNA, 20 bp, Artificial Sequence
  Description of Artificial Sequence: Synthetic oligonucleotide
gcaatggcaagtggcggggt

SEQ ID NO: 11704 - DNA, 20 bp, Artificial Sequence
  Description of Artificial Sequence: Synthetic oligonucleotide
caatggcaagtggcggggta

SEQ ID NO: 11705 - DNA, 20 bp, Artificial Sequence
  Description of Artificial Sequence: Synthetic oligonucleotide
aatggcaagtggcggggtag

SEQ ID NO: 11706 - DNA, 20 bp, Artificial Sequence
  Description of Artificial Sequence: Synthetic oligonucleotide
atggcaagtggcggggtagg

SEQ ID NO: 11707 - DNA, 20 bp, Artificial Sequence
  Description of Artificial Sequence: Synthetic oligonucleotide
tggcaagtggcggggtaggg

SEQ ID NO: 11708 - DNA, 20 bp, Artificial Sequence
  Description of Artificial Sequence: Synthetic oligonucleotide
ggcaagtggcggggtagggg

SEQ ID NO: 11709 - DNA, 20 bp, Artificial Sequence
  Description of Artificial Sequence: Synthetic oligonucleotide
gcaagtggcggggtaggggt

SEQ ID NO: 11710 - DNA, 20 bp, Artificial Sequence
  Description of Artificial Sequence: Synthetic oligonucleotide
caagtggcggggtaggggtg

SEQ ID NO: 11711 - DNA, 20 bp, Artificial Sequence
  Description of Artificial Sequence: Synthetic oligonucleotide
aagtggcggggtaggggtgg

SEQ ID NO: 11712 - DNA, 20 bp, Artificial Sequence
  Description of Artificial Sequence: Synthetic oligonucleotide
agtggcggggtaggggtggc

SEQ ID NO: 11713 - DNA, 20 bp, Artificial Sequence
  Description of Artificial Sequence: Synthetic oligonucleotide
gtggcggggtaggggtggcc

SEQ ID NO: 11714 - DNA, 20 bp, Artificial Sequence
  Description of Artificial Sequence: Synthetic oligonucleotide
tggcggggtaggggtggcca

SEQ ID NO: 11715 - DNA, 20 bp, Artificial Sequence
  Description of Artificial Sequence: Synthetic oligonucleotide
ggcggggtaggggtggccac

SEQ ID NO: 11716 - DNA, 20 bp, Artificial Sequence
  Description of Artificial Sequence: Synthetic oligonucleotide
gcggggtaggggtggccacc

SEQ ID NO: 11717 - DNA, 20 bp, Artificial Sequence
  Description of Artificial Sequence: Synthetic oligonucleotide
cggggtaggggtggccaccg

SEQ ID NO: 11718 - DNA, 20 bp, Artificial Sequence
  Description of Artificial Sequence: Synthetic oligonucleotide
ggggtaggggtggccaccgg

SEQ ID NO: 11719 - DNA, 20 bp, Artificial Sequence
  Description of Artificial Sequence: Synthetic oligonucleotide
gggtaggggtggccaccgga

SEQ ID NO: 11720 - DNA, 20 bp, Artificial Sequence
  Description of Artificial Sequence: Synthetic oligonucleotide
ggtaggggtggccaccggag

SEQ ID NO: 11721 - DNA, 20 bp, Artificial Sequence
  Description of Artificial Sequence: Synthetic oligonucleotide
gtaggggtggccaccggaga

SEQ ID NO: 11722 - DNA, 20 bp, Artificial Sequence
  Description of Artificial Sequence: Synthetic oligonucleotide
taggggtggccaccggagag

SEQ ID NO: 11723 - DNA, 20 bp, Artificial Sequence
  Description of Artificial Sequence: Synthetic oligonucleotide
aggggtggccaccggagagc

SEQ ID NO: 11724 - DNA, 20 bp, Artificial Sequence
  Description of Artificial Sequence: Synthetic oligonucleotide
ggggtggccaccggagagca

SEQ ID NO: 11725 - DNA, 20 bp, Artificial Sequence
  Description of Artificial Sequence: Synthetic oligonucleotide
gggtggccaccggagagcat

SEQ ID NO: 11726 - DNA, 20 bp, Artificial Sequence
  Description of Artificial Sequence: Synthetic oligonucleotide
ggtggccaccggagagcatc

SEQ ID NO: 11727 - DNA, 20 bp, Artificial Sequence
  Description of Artificial Sequence: Synthetic oligonucleotide
gtggccaccggagagcatcg

SEQ ID NO: 11728 - DNA, 20 bp, Artificial Sequence
  Description of Artificial Sequence: Synthetic oligonucleotide
tggccaccggagagcatcga

SEQ ID NO: 11729 - DNA, 20 bp, Artificial Sequence
  Description of Artificial Sequence: Synthetic oligonucleotide
ggccaccggagagcatcgag

SEQ ID NO: 11730 - DNA, 20 bp, Artificial Sequence
  Description of Artificial Sequence: Synthetic oligonucleotide
gccaccggagagcatcgagg

SEQ ID NO: 11731 - DNA, 20 bp, Artificial Sequence
  Description of Artificial Sequence: Synthetic oligonucleotide
ccaccggagagcatcgaggg

SEQ ID NO: 11732 - DNA, 20 bp, Artificial Sequence
  Description of Artificial Sequence: Synthetic oligonucleotide
caccggagagcatcgagggg

SEQ ID NO: 11733 - DNA, 20 bp, Artificial Sequence
  Description of Artificial Sequence: Synthetic oligonucleotide
accggagagcatcgaggggc

SEQ ID NO: 11734 - DNA, 20 bp, Artificial Sequence
  Description of Artificial Sequence: Synthetic oligonucleotide
ccggagagcatcgaggggca

SEQ ID NO: 11735 - DNA, 20 bp, Artificial Sequence
  Description of Artificial Sequence: Synthetic oligonucleotide
cggagagcatcgaggggcag

SEQ ID NO: 11736 - DNA, 20 bp, Artificial Sequence
  Description of Artificial Sequence: Synthetic oligonucleotide
ggagagcatcgaggggcaga

SEQ ID NO: 11737 - DNA, 20 bp, Artificial Sequence
  Description of Artificial Sequence: Synthetic oligonucleotide
gagagcatcgaggggcagac

SEQ ID NO: 11738 - DNA, 20 bp, Artificial Sequence
  Description of Artificial Sequence: Synthetic oligonucleotide
agagcatcgaggggcagaca

SEQ ID NO: 11739 - DNA, 20 bp, Artificial Sequence
  Description of Artificial Sequence: Synthetic oligonucleotide
gagcatcgaggggcagacac

SEQ ID NO: 11740 - DNA, 20 bp, Artificial Sequence
  Description of Artificial Sequence: Synthetic oligonucleotide
agcatcgaggggcagacact

SEQ ID NO: 11741 - DNA, 20 bp, Artificial Sequence
  Description of Artificial Sequence: Synthetic oligonucleotide
gcatcgaggggcagacactc

SEQ ID NO: 11742 - DNA, 20 bp, Artificial Sequence
  Description of Artificial Sequence: Synthetic oligonucleotide
catcgaggggcagacactca

SEQ ID NO: 11743 - DNA, 20 bp, Artificial Sequence
  Description of Artificial Sequence: Synthetic oligonucleotide
atcgaggggcagacactcac

SEQ ID NO: 11744 - DNA, 20 bp, Artificial Sequence
  Description of Artificial Sequence: Synthetic oligonucleotide
tcgaggggcagacactcacg

SEQ ID NO: 11745 - DNA, 20 bp, Artificial Sequence
  Description of Artificial Sequence: Synthetic oligonucleotide
cgaggggcagacactcacgg

SEQ ID NO: 11746 - DNA, 20 bp, Artificial Sequence
  Description of Artificial Sequence: Synthetic oligonucleotide
gaggggcagacactcacggt

SEQ ID NO: 11747 - DNA, 20 bp, Artificial Sequence
  Description of Artificial Sequence: Synthetic oligonucleotide
aggggcagacactcacggtg

SEQ ID NO: 11748 - DNA, 20 bp, Artificial Sequence
  Description of Artificial Sequence: Synthetic oligonucleotide
ggggcagacactcacggtgc

SEQ ID NO: 11749 - DNA, 20 bp, Artificial Sequence
  Description of Artificial Sequence: Synthetic oligonucleotide
gggcagacactcacggtgca

SEQ ID NO: 11750 - DNA, 20 bp, Artificial Sequence
  Description of Artificial Sequence: Synthetic oligonucleotide
ggcagacactcacggtgcag

SEQ ID NO: 11751 - DNA, 20 bp, Artificial Sequence
  Description of Artificial Sequence: Synthetic oligonucleotide
gcagacactcacggtgcagg

SEQ ID NO: 11752 - DNA, 20 bp, Artificial Sequence
  Description of Artificial Sequence: Synthetic oligonucleotide
cagacactcacggtgcaggc

SEQ ID NO: 11753 - DNA, 20 bp, Artificial Sequence
  Description of Artificial Sequence: Synthetic oligonucleotide
agacactcacggtgcaggcg

SEQ ID NO: 11754 - DNA, 20 bp, Artificial Sequence
  Description of Artificial Sequence: Synthetic oligonucleotide
gacactcacggtgcaggcgg

SEQ ID NO: 11755 - DNA, 20 bp, Artificial Sequence
  Description of Artificial Sequence: Synthetic oligonucleotide
acactcacggtgcaggcggc

SEQ ID NO: 11756 - DNA, 20 bp, Artificial Sequence
  Description of Artificial Sequence: Synthetic oligonucleotide
cactcacggtgcaggcggct

SEQ ID NO: 11757 - DNA, 20 bp, Artificial Sequence
  Description of Artificial Sequence: Synthetic oligonucleotide
actcacggtgcaggcggctg

SEQ ID NO: 11758 - DNA, 20 bp, Artificial Sequence
  Description of Artificial Sequence: Synthetic oligonucleotide
ctcacggtgcaggcggctga

SEQ ID NO: 11759 - DNA, 20 bp, Artificial Sequence
  Description of Artificial Sequence: Synthetic oligonucleotide
tcacggtgcaggcggctgac

SEQ ID NO: 11760 - DNA, 20 bp, Artificial Sequence
  Description of Artificial Sequence: Synthetic oligonucleotide
cacggtgcaggcggctgaca

SEQ ID NO: 11761 - DNA, 20 bp, Artificial Sequence
  Description of Artificial Sequence: Synthetic oligonucleotide
acggtgcaggcggctgacat

SEQ ID NO: 11762 - DNA, 20 bp, Artificial Sequence
  Description of Artificial Sequence: Synthetic oligonucleotide
cggtgcaggcggctgacatt

SEQ ID NO: 11763 - DNA, 20 bp, Artificial Sequence
  Description of Artificial Sequence: Synthetic oligonucleotide
ggtgcaggcggctgacattg

SEQ ID NO: 11764 - DNA, 20 bp, Artificial Sequence
  Description of Artificial Sequence: Synthetic oligonucleotide
gtgcaggcggctgacattgt

SEQ ID NO: 11765 - DNA, 20 bp, Artificial Sequence
  Description of Artificial Sequence: Synthetic oligonucleotide
tgcaggcggctgacattgtg

SEQ ID NO: 11766 - DNA, 20 bp, Artificial Sequence
  Description of Artificial Sequence: Synthetic oligonucleotide
gcaggcggctgacattgtga

SEQ ID NO: 11767 - DNA, 20 bp, Artificial Sequence
  Description of Artificial Sequence: Synthetic oligonucleotide
caggcggctgacattgtgag

SEQ ID NO: 11768 - DNA, 20 bp, Artificial Sequence
  Description of Artificial Sequence: Synthetic oligonucleotide
aggcggctgacattgtgagc

SEQ ID NO: 11769 - DNA, 20 bp, Artificial Sequence
  Description of Artificial Sequence: Synthetic oligonucleotide
ggcggctgacattgtgagcc

SEQ ID NO: 11770 - DNA, 20 bp, Artificial Sequence
  Description of Artificial Sequence: Synthetic oligonucleotide
gcggctgacattgtgagccg

SEQ ID NO: 11771 - DNA, 20 bp, Artificial Sequence
  Description of Artificial Sequence: Synthetic oligonucleotide
cggctgacattgtgagccgg

SEQ ID NO: 11772 - DNA, 20 bp, Artificial Sequence
  Description of Artificial Sequence: Synthetic oligonucleotide
ggctgacattgtgagccggg

SEQ ID NO: 11773 - DNA, 20 bp, Artificial Sequence
  Description of Artificial Sequence: Synthetic oligonucleotide
gctgacattgtgagccgggt

SEQ ID NO: 11774 - DNA, 20 bp, Artificial Sequence
  Description of Artificial Sequence: Synthetic oligonucleotide
ctgacattgtgagccgggtc

SEQ ID NO: 11775 - DNA, 20 bp, Artificial Sequence
  Description of Artificial Sequence: Synthetic oligonucleotide
tgacattgtgagccgggtca

SEQ ID NO: 11776 - DNA, 20 bp, Artificial Sequence
  Description of Artificial Sequence: Synthetic oligonucleotide
gacattgtgagccgggtcaa

SEQ ID NO: 11777 - DNA, 20 bp, Artificial Sequence
  Description of Artificial Sequence: Synthetic oligonucleotide
acattgtgagccgggtcaac

SEQ ID NO: 11778 - DNA, 20 bp, Artificial Sequence
  Description of Artificial Sequence: Synthetic oligonucleotide
cattgtgagccgggtcaact

SEQ ID NO: 11779 - DNA, 20 bp, Artificial Sequence
  Description of Artificial Sequence: Synthetic oligonucleotide
attgtgagccgggtcaactg

SEQ ID NO: 11780 - DNA, 20 bp, Artificial Sequence
  Description of Artificial Sequence: Synthetic oligonucleotide
ttgtgagccgggtcaactgg

SEQ ID NO: 11781 - DNA, 20 bp, Artificial Sequence
  Description of Artificial Sequence: Synthetic oligonucleotide
tgtgagccgggtcaactggc

SEQ ID NO: 11782 - DNA, 20 bp, Artificial Sequence
  Description of Artificial Sequence: Synthetic oligonucleotide
gtgagccgggtcaactggct

SEQ ID NO: 11783 - DNA, 20 bp, Artificial Sequence
  Description of Artificial Sequence: Synthetic oligonucleotide
tgagccgggtcaactggctg

SEQ ID NO: 11784 - DNA, 20 bp, Artificial Sequence
  Description of Artificial Sequence: Synthetic oligonucleotide
gagccgggtcaactggctgg

SEQ ID NO: 11785 - DNA, 20 bp, Artificial Sequence
  Description of Artificial Sequence: Synthetic oligonucleotide
agccgggtcaactggctggg

SEQ ID NO: 11786 - DNA, 20 bp, Artificial Sequence
  Description of Artificial Sequence: Synthetic oligonucleotide
gccgggtcaactggctgggc

SEQ ID NO: 11787 - DNA, 20 bp, Artificial Sequence
  Description of Artificial Sequence: Synthetic oligonucleotide
ccgggtcaactggctgggcc

SEQ ID NO: 11788 - DNA, 20 bp, Artificial Sequence
  Description of Artificial Sequence: Synthetic oligonucleotide
cgggtcaactggctgggcca

SEQ ID NO: 11789 - DNA, 20 bp, Artificial Sequence
  Description of Artificial Sequence: Synthetic oligonucleotide
gggtcaactggctgggccat

SEQ ID NO: 11790 - DNA, 20 bp, Artificial Sequence
  Description of Artificial Sequence: Synthetic oligonucleotide
ggtcaactggctgggccatc

SEQ ID NO: 11791 - DNA, 20 bp, Artificial Sequence
  Description of Artificial Sequence: Synthetic oligonucleotide
gtcaactggctgggccatct

SEQ ID NO: 11792 - DNA, 20 bp, Artificial Sequence
  Description of Artificial Sequence: Synthetic oligonucleotide
tcaactggctgggccatctc

SEQ ID NO: 11793 - DNA, 20 bp, Artificial Sequence
  Description of Artificial Sequence: Synthetic oligonucleotide
caactggctgggccatctcg

SEQ ID NO: 11794 - DNA, 20 bp, Artificial Sequence
  Description of Artificial Sequence: Synthetic oligonucleotide
aactggctgggccatctcgg

SEQ ID NO: 11795 - DNA, 20 bp, Artificial Sequence
  Description of Artificial Sequence: Synthetic oligonucleotide
actggctgggccatctcggg

SEQ ID NO: 11796 - DNA, 20 bp, Artificial Sequence
  Description of Artificial Sequence: Synthetic oligonucleotide
ctggctgggccatctcgggc

SEQ ID NO: 11797 - DNA, 20 bp, Artificial Sequence
  Description of Artificial Sequence: Synthetic oligonucleotide
tggctgggccatctcgggca

SEQ ID NO: 11798 - DNA, 20 bp, Artificial Sequence
  Description of Artificial Sequence: Synthetic oligonucleotide
ggctgggccatctcgggcag

SEQ ID NO: 11799 - DNA, 20 bp, Artificial Sequence
  Description of Artificial Sequence: Synthetic oligonucleotide
gctgggccatctcgggcagc

SEQ ID NO: 11800 - DNA, 20 bp, Artificial Sequence
  Description of Artificial Sequence: Synthetic oligonucleotide
ctgggccatctcgggcagcc

SEQ ID NO: 11801 - DNA, 20 bp, Artificial Sequence
  Description of Artificial Sequence: Synthetic oligonucleotide
tgggccatctcgggcagcct

SEQ ID NO: 11802 - DNA, 20 bp, Artificial Sequence
  Description of Artificial Sequence: Synthetic oligonucleotide
gggccatctcgggcagcctc

SEQ ID NO: 11803 - DNA, 20 bp, Artificial Sequence
  Description of Artificial Sequence: Synthetic oligonucleotide
ggccatctcgggcagcctct

SEQ ID NO: 11804 - DNA, 20 bp, Artificial Sequence
  Description of Artificial Sequence: Synthetic oligonucleotide
gccatctcgggcagcctctt

SEQ ID NO: 11805 - DNA, 20 bp, Artificial Sequence
  Description of Artificial Sequence: Synthetic oligonucleotide
ccatctcgggcagcctcttt

SEQ ID NO: 11806 - DNA, 20 bp, Artificial Sequence
  Description of Artificial Sequence: Synthetic oligonucleotide
catctcgggcagcctctttc

SEQ ID NO: 11807 - DNA, 20 bp, Artificial Sequence
  Description of Artificial Sequence: Synthetic oligonucleotide
atctcgggcagcctctttct

SEQ ID NO: 11808 - DNA, 20 bp, Artificial Sequence
  Description of Artificial Sequence: Synthetic oligonucleotide
tctcgggcagcctctttctt

SEQ ID NO: 11809 - DNA, 20 bp, Artificial Sequence
  Description of Artificial Sequence: Synthetic oligonucleotide
ctcgggcagcctctttcttc

SEQ ID NO: 11810 - DNA, 20 bp, Artificial Sequence
  Description of Artificial Sequence: Synthetic oligonucleotide
tcgggcagcctctttcttcg

SEQ ID NO: 11811 - DNA, 20 bp, Artificial Sequence
  Description of Artificial Sequence: Synthetic oligonucleotide
cgggcagcctctttcttcgg

SEQ ID NO: 11812 - DNA, 20 bp, Artificial Sequence
  Description of Artificial Sequence: Synthetic oligonucleotide
gggcagcctctttcttcggg

SEQ ID NO: 11813 - DNA, 20 bp, Artificial Sequence
  Description of Artificial Sequence: Synthetic oligonucleotide
ggcagcctctttcttcgggc

SEQ ID NO: 11814 - DNA, 20 bp, Artificial Sequence
  Description of Artificial Sequence: Synthetic oligonucleotide
gcagcctctttcttcgggca

SEQ ID NO: 11815 - DNA, 20 bp, Artificial Sequence
  Description of Artificial Sequence: Synthetic oligonucleotide
cagcctctttcttcgggcag

SEQ ID NO: 11816 - DNA, 20 bp, Artificial Sequence
  Description of Artificial Sequence: Synthetic oligonucleotide
agcctctttcttcgggcagg

SEQ ID NO: 11817 - DNA, 20 bp, Artificial Sequence
  Description of Artificial Sequence: Synthetic oligonucleotide
gcctctttcttcgggcaggc

SEQ ID NO: 11818 - DNA, 20 bp, Artificial Sequence
  Description of Artificial Sequence: Synthetic oligonucleotide
cctctttcttcgggcaggct

SEQ ID NO: 11819 - DNA, 20 bp, Artificial Sequence
  Description of Artificial Sequence: Synthetic oligonucleotide
ctctttcttcgggcaggctt

SEQ ID NO: 11820 - DNA, 20 bp, Artificial Sequence
  Description of Artificial Sequence: Synthetic oligonucleotide
tctttcttcgggcaggcttg

SEQ ID NO: 11821 - DNA, 20 bp, Artificial Sequence
  Description of Artificial Sequence: Synthetic oligonucleotide
ctttcttcgggcaggcttgg

SEQ ID NO: 11822 - DNA, 20 bp, Artificial Sequence
  Description of Artificial Sequence: Synthetic oligonucleotide
tttcttcgggcaggcttggc

SEQ ID NO: 11823 - DNA, 20 bp, Artificial Sequence
  Description of Artificial Sequence: Synthetic oligonucleotide
ttcttcgggcaggcttggcc

SEQ ID NO: 11824 - DNA, 20 bp, Artificial Sequence
  Description of Artificial Sequence: Synthetic oligonucleotide
tcttcgggcaggcttggcca

SEQ ID NO: 11825 - DNA, 20 bp, Artificial Sequence
  Description of Artificial Sequence: Synthetic oligonucleotide
cttcgggcaggcttggccac

SEQ ID NO: 11826 - DNA, 20 bp, Artificial Sequence
  Description of Artificial Sequence: Synthetic oligonucleotide
ttcgggcaggcttggccacc

SEQ ID NO: 11827 - DNA, 20 bp, Artificial Sequence
  Description of Artificial Sequence: Synthetic oligonucleotide
tcgggcaggcttggccacct

SEQ ID NO: 11828 - DNA, 20 bp, Artificial Sequence
  Description of Artificial Sequence: Synthetic oligonucleotide
cgggcaggcttggccacctc

SEQ ID NO: 11829 - DNA, 20 bp, Artificial Sequence
  Description of Artificial Sequence: Synthetic oligonucleotide
gggcaggcttggccacctca

SEQ ID NO: 11830 - DNA, 20 bp, Artificial Sequence
  Description of Artificial Sequence: Synthetic oligonucleotide
ggcaggcttggccacctcat

SEQ ID NO: 11831 - DNA, 20 bp, Artificial Sequence
  Description of Artificial Sequence: Synthetic oligonucleotide
gcaggcttggccacctcatg

SEQ ID NO: 11832 - DNA, 20 bp, Artificial Sequence
  Description of Artificial Sequence: Synthetic oligonucleotide
caggcttggccacctcatgg

SEQ ID NO: 11833 - DNA, 20 bp, Artificial Sequence
  Description of Artificial Sequence: Synthetic oligonucleotide
aggcttggccacctcatggt

SEQ ID NO: 11834 - DNA, 20 bp, Artificial Sequence
  Description of Artificial Sequence: Synthetic oligonucleotide
ggcttggccacctcatggtc

SEQ ID NO: 11835 - DNA, 20 bp, Artificial Sequence
  Description of Artificial Sequence: Synthetic oligonucleotide
gcttggccacctcatggtct

SEQ ID NO: 11836 - DNA, 20 bp, Artificial Sequence
  Description of Artificial Sequence: Synthetic oligonucleotide
cttggccacctcatggtcta

SEQ ID NO: 11837 - DNA, 20 bp, Artificial Sequence
  Description of Artificial Sequence: Synthetic oligonucleotide
ttggccacctcatggtctag

SEQ ID NO: 11838 - DNA, 20 bp, Artificial Sequence
  Description of Artificial Sequence: Synthetic oligonucleotide
tggccacctcatggtctagg

SEQ ID NO: 11839 - DNA, 20 bp, Artificial Sequence
  Description of Artificial Sequence: Synthetic oligonucleotide
ggccacctcatggtctaggt

SEQ ID NO: 11840 - DNA, 20 bp, Artificial Sequence
  Description of Artificial Sequence: Synthetic oligonucleotide
gccacctcatggtctaggtg

SEQ ID NO: 11841 - DNA, 20 bp, Artificial Sequence
  Description of Artificial Sequence: Synthetic oligonucleotide
ccacctcatggtctaggtgc

SEQ ID NO: 11842 - DNA, 20 bp, Artificial Sequence
  Description of Artificial Sequence: Synthetic oligonucleotide
cacctcatggtctaggtgct

SEQ ID NO: 11843 - DNA, 20 bp, Artificial Sequence
  Description of Artificial Sequence: Synthetic oligonucleotide
acctcatggtctaggtgctt

SEQ ID NO: 11844 - DNA, 20 bp, Artificial Sequence
  Description of Artificial Sequence: Synthetic oligonucleotide
cctcatggtctaggtgcttg

SEQ ID NO: 11845 - DNA, 20 bp, Artificial Sequence
  Description of Artificial Sequence: Synthetic oligonucleotide
ctcatggtctaggtgcttgt

SEQ ID NO: 11846 - DNA, 20 bp, Artificial Sequence
  Description of Artificial Sequence: Synthetic oligonucleotide
tcatggtctaggtgcttgtg

SEQ ID NO: 11847 - DNA, 20 bp, Artificial Sequence
  Description of Artificial Sequence: Synthetic oligonucleotide
catggtctaggtgcttgtgg

SEQ ID NO: 11848 - DNA, 20 bp, Artificial Sequence
  Description of Artificial Sequence: Synthetic oligonucleotide
atggtctaggtgcttgtggt

SEQ ID NO: 11849 - DNA, 20 bp, Artificial Sequence
  Description of Artificial Sequence: Synthetic oligonucleotide
tggtctaggtgcttgtggtc

SEQ ID NO: 11850 - DNA, 20 bp, Artificial Sequence
  Description of Artificial Sequence: Synthetic oligonucleotide
ggtctaggtgcttgtggtcc

SEQ ID NO: 11851 - DNA, 20 bp, Artificial Sequence
  Description of Artificial Sequence: Synthetic oligonucleotide
gtctaggtgcttgtggtcca

SEQ ID NO: 11852 - DNA, 20 bp, Artificial Sequence
  Description of Artificial Sequence: Synthetic oligonucleotide
tctaggtgcttgtggtccag

SEQ ID NO: 11853 - DNA, 20 bp, Artificial Sequence
  Description of Artificial Sequence: Synthetic oligonucleotide
ctaggtgcttgtggtccagg

SEQ ID NO: 11854 - DNA, 20 bp, Artificial Sequence
  Description of Artificial Sequence: Synthetic oligonucleotide
taggtgcttgtggtccagga

SEQ ID NO: 11855 - DNA, 20 bp, Artificial Sequence
  Description of Artificial Sequence: Synthetic oligonucleotide
aggtgcttgtggtccaggag

SEQ ID NO: 11856 - DNA, 20 bp, Artificial Sequence
  Description of Artificial Sequence: Synthetic oligonucleotide
ggtgcttgtggtccaggagg

SEQ ID NO: 11857 - DNA, 20 bp, Artificial Sequence
  Description of Artificial Sequence: Synthetic oligonucleotide
gtgcttgtggtccaggaggc

SEQ ID NO: 11858 - DNA, 20 bp, Artificial Sequence
  Description of Artificial Sequence: Synthetic oligonucleotide
tgcttgtggtccaggaggcc

SEQ ID NO: 11859 - DNA, 20 bp, Artificial Sequence
  Description of Artificial Sequence: Synthetic oligonucleotide
gcttgtggtccaggaggcca

SEQ ID NO: 11860 - DNA, 20 bp, Artificial Sequence
  Description of Artificial Sequence: Synthetic oligonucleotide
cttgtggtccaggaggccaa

SEQ ID NO: 11861 - DNA, 20 bp, Artificial Sequence
  Description of Artificial Sequence: Synthetic oligonucleotide
ttgtggtccaggaggccaaa

SEQ ID NO: 11862 - DNA, 20 bp, Artificial Sequence
  Description of Artificial Sequence: Synthetic oligonucleotide
tgtggtccaggaggccaaac

SEQ ID NO: 11863 - DNA, 20 bp, Artificial Sequence
  Description of Artificial Sequence: Synthetic oligonucleotide
gtggtccaggaggccaaact

SEQ ID NO: 11864 - DNA, 20 bp, Artificial Sequence
  Description of Artificial Sequence: Synthetic oligonucleotide
tggtccaggaggccaaacta

SEQ ID NO: 11865 - DNA, 20 bp, Artificial Sequence
  Description of Artificial Sequence: Synthetic oligonucleotide
ggtccaggaggccaaactag

SEQ ID NO: 11866 - DNA, 20 bp, Artificial Sequence
  Description of Artificial Sequence: Synthetic oligonucleotide
gtccaggaggccaaactagg

SEQ ID NO: 11867 - DNA, 20 bp, Artificial Sequence
  Description of Artificial Sequence: Synthetic oligonucleotide
tccaggaggccaaactagga

SEQ ID NO: 11868 - DNA, 20 bp, Artificial Sequence
  Description of Artificial Sequence: Synthetic oligonucleotide
ccaggaggccaaactaggat

SEQ ID NO: 11869 - DNA, 20 bp, Artificial Sequence
  Description of Artificial Sequence: Synthetic oligonucleotide
caggaggccaaactaggatg

SEQ ID NO: 11870 - DNA, 20 bp, Artificial Sequence
  Description of Artificial Sequence: Synthetic oligonucleotide
aggaggccaaactaggatgg

SEQ ID NO: 11871 - DNA, 20 bp, Artificial Sequence
  Description of Artificial Sequence: Synthetic oligonucleotide
ggaggccaaactaggatggg

SEQ ID NO: 11872 - DNA, 20 bp, Artificial Sequence
  Description of Artificial Sequence: Synthetic oligonucleotide
gaggccaaactaggatggga

SEQ ID NO: 11873 - DNA, 20 bp, Artificial Sequence
  Description of Artificial Sequence: Synthetic oligonucleotide
aggccaaactaggatgggac

SEQ ID NO: 11874 - DNA, 20 bp, Artificial Sequence
  Description of Artificial Sequence: Synthetic oligonucleotide
ggccaaactaggatgggacg

SEQ ID NO: 11875 - DNA, 20 bp, Artificial Sequence
  Description of Artificial Sequence: Synthetic oligonucleotide
gccaaactaggatgggacgg

SEQ ID NO: 11876 - DNA, 20 bp, Artificial Sequence
  Description of Artificial Sequence: Synthetic oligonucleotide
ccaaactaggatgggacggg

SEQ ID NO: 11877 - DNA, 20 bp, Artificial Sequence
  Description of Artificial Sequence: Synthetic oligonucleotide
caaactaggatgggacggga

SEQ ID NO: 11878 - DNA, 20 bp, Artificial Sequence
  Description of Artificial Sequence: Synthetic oligonucleotide
aaactaggatgggacgggag

SEQ ID NO: 11879 - DNA, 20 bp, Artificial Sequence
  Description of Artificial Sequence: Synthetic oligonucleotide
aactaggatgggacgggagg

SEQ ID NO: 11880 - DNA, 20 bp, Artificial Sequence
  Description of Artificial Sequence: Synthetic oligonucleotide
actaggatgggacgggagga

SEQ ID NO: 11881 - DNA, 20 bp, Artificial Sequence
  Description of Artificial Sequence: Synthetic oligonucleotide
ctaggatgggacgggaggag

SEQ ID NO: 11882 - DNA, 20 bp, Artificial Sequence
  Description of Artificial Sequence: Synthetic oligonucleotide
taggatgggacgggaggagg

SEQ ID NO: 11883 - DNA, 20 bp, Artificial Sequence
  Description of Artificial Sequence: Synthetic oligonucleotide
aggatgggacgggaggaggg

SEQ ID NO: 11884 - DNA, 20 bp, Artificial Sequence
  Description of Artificial Sequence: Synthetic oligonucleotide
ggatgggacgggaggagggt

SEQ ID NO: 11885 - DNA, 20 bp, Artificial Sequence
  Description of Artificial Sequence: Synthetic oligonucleotide
gatgggacgggaggagggtg

SEQ ID NO: 11886 - DNA, 20 bp, Artificial Sequence
  Description of Artificial Sequence: Synthetic oligonucleotide
atgggacgggaggagggtgt

SEQ ID NO: 11887 - DNA, 20 bp, Artificial Sequence
  Description of Artificial Sequence: Synthetic oligonucleotide
tgggacgggaggagggtgtc

SEQ ID NO: 11888 - DNA, 20 bp, Artificial Sequence
  Description of Artificial Sequence: Synthetic oligonucleotide
gggacgggaggagggtgtca

SEQ ID NO: 11889 - DNA, 20 bp, Artificial Sequence
  Description of Artificial Sequence: Synthetic oligonucleotide
ggacgggaggagggtgtcag

SEQ ID NO: 11890 - DNA, 20 bp, Artificial Sequence
  Description of Artificial Sequence: Synthetic oligonucleotide
gacgggaggagggtgtcagg

SEQ ID NO: 11891 - DNA, 20 bp, Artificial Sequence
  Description of Artificial Sequence: Synthetic oligonucleotide
acgggaggagggtgtcaggt

SEQ ID NO: 11892 - DNA, 20 bp, Artificial Sequence
  Description of Artificial Sequence: Synthetic oligonucleotide
cgggaggagggtgtcaggtc

SEQ ID NO: 11893 - DNA, 20 bp, Artificial Sequence
  Description of Artificial Sequence: Synthetic oligonucleotide
gggaggagggtgtcaggtcc

SEQ ID NO: 11894 - DNA, 20 bp, Artificial Sequence
  Description of Artificial Sequence: Synthetic oligonucleotide
ggaggagggtgtcaggtcct

SEQ ID NO: 11895 - DNA, 20 bp, Artificial Sequence
  Description of Artificial Sequence: Synthetic oligonucleotide
gaggagggtgtcaggtcctg

SEQ ID NO: 11896 - DNA, 20 bp, Artificial Sequence
  Description of Artificial Sequence: Synthetic oligonucleotide
aggagggtgtcaggtcctgc

SEQ ID NO: 11897 - DNA, 20 bp, Artificial Sequence
  Description of Artificial Sequence: Synthetic oligonucleotide
ggagggtgtcaggtcctgcc

SEQ ID NO: 11898 - DNA, 20 bp, Artificial Sequence
  Description of Artificial Sequence: Synthetic oligonucleotide
gagggtgtcaggtcctgcct

SEQ ID NO: 11899 - DNA, 20 bp, Artificial Sequence
  Description of Artificial Sequence: Synthetic oligonucleotide
agggtgtcaggtcctgcctg

SEQ ID NO: 11900 - DNA, 20 bp, Artificial Sequence
  Description of Artificial Sequence: Synthetic oligonucleotide
gggtgtcaggtcctgcctgg

SEQ ID NO: 11901 - DNA, 20 bp, Artificial Sequence
  Description of Artificial Sequence: Synthetic oligonucleotide
ggtgtcaggtcctgcctggc

SEQ ID NO: 11902 - DNA, 20 bp, Artificial Sequence
  Description of Artificial Sequence: Synthetic oligonucleotide
gtgtcaggtcctgcctggcc

SEQ ID NO: 11903 - DNA, 20 bp, Artificial Sequence
  Description of Artificial Sequence: Synthetic oligonucleotide
tgtcaggtcctgcctggccc

SEQ ID NO: 11904 - DNA, 20 bp, Artificial Sequence
  Description of Artificial Sequence: Synthetic oligonucleotide
gtcaggtcctgcctggcccc

SEQ ID NO: 11905 - DNA, 20 bp, Artificial Sequence
  Description of Artificial Sequence: Synthetic oligonucleotide
tcaggtcctgcctggcccca

SEQ ID NO: 11906 - DNA, 20 bp, Artificial Sequence
  Description of Artificial Sequence: Synthetic oligonucleotide
caggtcctgcctggccccac

SEQ ID NO: 11907 - DNA, 20 bp, Artificial Sequence
  Description of Artificial Sequence: Synthetic oligonucleotide
aggtcctgcctggccccacg

SEQ ID NO: 11908 - DNA, 20 bp, Artificial Sequence
  Description of Artificial Sequence: Synthetic oligonucleotide
ggtcctgcctggccccacgt

SEQ ID NO: 11909 - DNA, 20 bp, Artificial Sequence
  Description of Artificial Sequence: Synthetic oligonucleotide
gtcctgcctggccccacgtc

SEQ ID NO: 11910 - DNA, 20 bp, Artificial Sequence
  Description of Artificial Sequence: Synthetic oligonucleotide
tcctgcctggccccacgtcc

SEQ ID NO: 11911 - DNA, 20 bp, Artificial Sequence
  Description of Artificial Sequence: Synthetic oligonucleotide
cctgcctggccccacgtccc

SEQ ID NO: 11912 - DNA, 20 bp, Artificial Sequence
  Description of Artificial Sequence: Synthetic oligonucleotide
ctgcctggccccacgtcccc

SEQ ID NO: 11913 - DNA, 20 bp, Artificial Sequence
  Description of Artificial Sequence: Synthetic oligonucleotide
tgcctggccccacgtcccca

SEQ ID NO: 11914 - DNA, 20 bp, Artificial Sequence
  Description of Artificial Sequence: Synthetic oligonucleotide
gcctggccccacgtccccag

SEQ ID NO: 11915 - DNA, 20 bp, Artificial Sequence
  Description of Artificial Sequence: Synthetic oligonucleotide
cctggccccacgtccccagc

SEQ ID NO: 11916 - DNA, 20 bp, Artificial Sequence
  Description of Artificial Sequence: Synthetic oligonucleotide
ctggccccacgtccccagcc

SEQ ID NO: 11917 - DNA, 20 bp, Artificial Sequence
  Description of Artificial Sequence: Synthetic oligonucleotide
tggccccacgtccccagcca

SEQ ID NO: 11918 - DNA, 20 bp, Artificial Sequence
  Description of Artificial Sequence: Synthetic oligonucleotide
ggccccacgtccccagccac

SEQ ID NO: 11919 - DNA, 20 bp, Artificial Sequence
  Description of Artificial Sequence: Synthetic oligonucleotide
gccccacgtccccagccaca

SEQ ID NO: 11920 - DNA, 20 bp, Artificial Sequence
  Description of Artificial Sequence: Synthetic oligonucleotide
ccccacgtccccagccacac

SEQ ID NO: 11921 - DNA, 20 bp, Artificial Sequence
  Description of Artificial Sequence: Synthetic oligonucleotide
cccacgtccccagccacacg

SEQ ID NO: 11922 - DNA, 20 bp, Artificial Sequence
  Description of Artificial Sequence: Synthetic oligonucleotide
ccacgtccccagccacacgt

SEQ ID NO: 11923 - DNA, 20 bp, Artificial Sequence
  Description of Artificial Sequence: Synthetic oligonucleotide
cacgtccccagccacacgtc

SEQ ID NO: 11924 - DNA, 20 bp, Artificial Sequence
  Description of Artificial Sequence: Synthetic oligonucleotide
acgtccccagccacacgtcc

SEQ ID NO: 11925 - DNA, 20 bp, Artificial Sequence
  Description of Artificial Sequence: Synthetic oligonucleotide
cgtccccagccacacgtcca

SEQ ID NO: 11926 - DNA, 20 bp, Artificial Sequence
  Description of Artificial Sequence: Synthetic oligonucleotide
gtccccagccacacgtccag

SEQ ID NO: 11927 - DNA, 20 bp, Artificial Sequence
  Description of Artificial Sequence: Synthetic oligonucleotide
tccccagccacacgtccagt

SEQ ID NO: 11928 - DNA, 20 bp, Artificial Sequence
  Description of Artificial Sequence: Synthetic oligonucleotide
ccccagccacacgtccagtt

SEQ ID NO: 11929 - DNA, 20 bp, Artificial Sequence
  Description of Artificial Sequence: Synthetic oligonucleotide
cccagccacacgtccagttc

SEQ ID NO: 11930 - DNA, 20 bp, Artificial Sequence
  Description of Artificial Sequence: Synthetic oligonucleotide
ccagccacacgtccagttct

SEQ ID NO: 11931 - DNA, 20 bp, Artificial Sequence
  Description of Artificial Sequence: Synthetic oligonucleotide
cagccacacgtccagttctc

SEQ ID NO: 11932 - DNA, 20 bp, Artificial Sequence
  Description of Artificial Sequence: Synthetic oligonucleotide
agccacacgtccagttctca

SEQ ID NO: 11933 - DNA, 20 bp, Artificial Sequence
  Description of Artificial Sequence: Synthetic oligonucleotide
gccacacgtccagttctcac

SEQ ID NO: 11934 - DNA, 20 bp, Artificial Sequence
  Description of Artificial Sequence: Synthetic oligonucleotide
ccacacgtccagttctcacc

SEQ ID NO: 11935 - DNA, 20 bp, Artificial Sequence
  Description of Artificial Sequence: Synthetic oligonucleotide
cacacgtccagttctcacca

SEQ ID NO: 11936 - DNA, 20 bp, Artificial Sequence
  Description of Artificial Sequence: Synthetic oligonucleotide
acacgtccagttctcaccac

SEQ ID NO: 11937 - DNA, 20 bp, Artificial Sequence
  Description of Artificial Sequence: Synthetic oligonucleotide
cacgtccagttctcaccacc

SEQ ID NO: 11938 - DNA, 20 bp, Artificial Sequence
  Description of Artificial Sequence: Synthetic oligonucleotide
acgtccagttctcaccacct

SEQ ID NO: 11939 - DNA, 20 bp, Artificial Sequence
  Description of Artificial Sequence: Synthetic oligonucleotide
cgtccagttctcaccacctc

SEQ ID NO: 11940 - DNA, 20 bp, Artificial Sequence
  Description of Artificial Sequence: Synthetic oligonucleotide
gtccagttctcaccacctcc

SEQ ID NO: 11941 - DNA, 20 bp, Artificial Sequence
  Description of Artificial Sequence: Synthetic oligonucleotide
tccagttctcaccacctccc

SEQ ID NO: 11942 - DNA, 20 bp, Artificial Sequence
  Description of Artificial Sequence: Synthetic oligonucleotide
ccagttctcaccacctccct

SEQ ID NO: 11943 - DNA, 20 bp, Artificial Sequence
  Description of Artificial Sequence: Synthetic oligonucleotide
cagttctcaccacctccctc

SEQ ID NO: 11944 - DNA, 20 bp, Artificial Sequence
  Description of Artificial Sequence: Synthetic oligonucleotide
agttctcaccacctccctct

SEQ ID NO: 11945 - DNA, 20 bp, Artificial Sequence
  Description of Artificial Sequence: Synthetic oligonucleotide
gttctcaccacctccctctc

SEQ ID NO: 11946 - DNA, 20 bp, Artificial Sequence
  Description of Artificial Sequence: Synthetic oligonucleotide
ttctcaccacctccctctca

SEQ ID NO: 11947 - DNA, 20 bp, Artificial Sequence
  Description of Artificial Sequence: Synthetic oligonucleotide
tctcaccacctccctctcaa

SEQ ID NO: 11948 - DNA, 20 bp, Artificial Sequence
  Description of Artificial Sequence: Synthetic oligonucleotide
ctcaccacctccctctcaac

SEQ ID NO: 11949 - DNA, 20 bp, Artificial Sequence
  Description of Artificial Sequence: Synthetic oligonucleotide
tcaccacctccctctcaacc

SEQ ID NO: 11950 - DNA, 20 bp, Artificial Sequence
  Description of Artificial Sequence: Synthetic oligonucleotide
caccacctccctctcaacct

SEQ ID NO: 11951 - DNA, 20 bp, Artificial Sequence
  Description of Artificial Sequence: Synthetic oligonucleotide
accacctccctctcaacctg

SEQ ID NO: 11952 - DNA, 20 bp, Artificial Sequence
  Description of Artificial Sequence: Synthetic oligonucleotide
ccacctccctctcaacctgg

SEQ ID NO: 11953 - DNA, 20 bp, Artificial Sequence
  Description of Artificial Sequence: Synthetic oligonucleotide
cacctccctctcaacctggg

SEQ ID NO: 11954 - DNA, 20 bp, Artificial Sequence
  Description of Artificial Sequence: Synthetic oligonucleotide
acctccctctcaacctgggg

SEQ ID NO: 11955 - DNA, 20 bp, Artificial Sequence
  Description of Artificial Sequence: Synthetic oligonucleotide
cctccctctcaacctggggt

SEQ ID NO: 11956 - DNA, 20 bp, Artificial Sequence
  Description of Artificial Sequence: Synthetic oligonucleotide
ctccctctcaacctggggtc

SEQ ID NO: 11957 - DNA, 20 bp, Artificial Sequence
  Description of Artificial Sequence: Synthetic oligonucleotide
tccctctcaacctggggtcc

SEQ ID NO: 11958 - DNA, 20 bp, Artificial Sequence
  Description of Artificial Sequence: Synthetic oligonucleotide
ccctctcaacctggggtcca

SEQ ID NO: 11959 - DNA, 20 bp, Artificial Sequence
  Description of Artificial Sequence: Synthetic oligonucleotide
cctctcaacctggggtccag

SEQ ID NO: 11960 - DNA, 20 bp, Artificial Sequence
  Description of Artificial Sequence: Synthetic oligonucleotide
ctctcaacctggggtccagc

SEQ ID NO: 11961 - DNA, 20 bp, Artificial Sequence
  Description of Artificial Sequence: Synthetic oligonucleotide
tctcaacctggggtccagct

SEQ ID NO: 11962 - DNA, 20 bp, Artificial Sequence
  Description of Artificial Sequence: Synthetic oligonucleotide
ctcaacctggggtccagcta

SEQ ID NO: 11963 - DNA, 20 bp, Artificial Sequence
  Description of Artificial Sequence: Synthetic oligonucleotide
tcaacctggggtccagctat

SEQ ID NO: 11964 - DNA, 20 bp, Artificial Sequence
  Description of Artificial Sequence: Synthetic oligonucleotide
caacctggggtccagctatc

SEQ ID NO: 11965 - DNA, 20 bp, Artificial Sequence
  Description of Artificial Sequence: Synthetic oligonucleotide
aacctggggtccagctatca

SEQ ID NO: 11966 - DNA, 20 bp, Artificial Sequence
  Description of Artificial Sequence: Synthetic oligonucleotide
acctggggtccagctatcag

SEQ ID NO: 11967 - DNA, 20 bp, Artificial Sequence
  Description of Artificial Sequence: Synthetic oligonucleotide
cctggggtccagctatcaga

SEQ ID NO: 11968 - DNA, 20 bp, Artificial Sequence
  Description of Artificial Sequence: Synthetic oligonucleotide
ctggggtccagctatcagag

SEQ ID NO: 11969 - DNA, 20 bp, Artificial Sequence
  Description of Artificial Sequence: Synthetic oligonucleotide
tggggtccagctatcagagg

SEQ ID NO: 11970 - DNA, 20 bp, Artificial Sequence
  Description of Artificial Sequence: Synthetic oligonucleotide
ggggtccagctatcagaggg

SEQ ID NO: 11971 - DNA, 20 bp, Artificial Sequence
  Description of Artificial Sequence: Synthetic oligonucleotide
gggtccagctatcagaggga

SEQ ID NO: 11972 - DNA, 20 bp, Artificial Sequence
  Description of Artificial Sequence: Synthetic oligonucleotide
ggtccagctatcagagggac

SEQ ID NO: 11973 - DNA, 20 bp, Artificial Sequence
  Description of Artificial Sequence: Synthetic oligonucleotide
gtccagctatcagagggacc

SEQ ID NO: 11974 - DNA, 20 bp, Artificial Sequence
  Description of Artificial Sequence: Synthetic oligonucleotide
tccagctatcagagggacct

SEQ ID NO: 11975 - DNA, 20 bp, Artificial Sequence
  Description of Artificial Sequence: Synthetic oligonucleotide
ccagctatcagagggacctt

SEQ ID NO: 11976 - DNA, 20 bp, Artificial Sequence
  Description of Artificial Sequence: Synthetic oligonucleotide
cagctatcagagggaccttt

SEQ ID NO: 11977 - DNA, 20 bp, Artificial Sequence
  Description of Artificial Sequence: Synthetic oligonucleotide
agctatcagagggacctttt

SEQ ID NO: 11978 - DNA, 20 bp, Artificial Sequence
  Description of Artificial Sequence: Synthetic oligonucleotide
gctatcagagggaccttttc

SEQ ID NO: 11979 - DNA, 20 bp, Artificial Sequence
  Description of Artificial Sequence: Synthetic oligonucleotide
ctatcagagggaccttttct

SEQ ID NO: 11980 - DNA, 20 bp, Artificial Sequence
  Description of Artificial Sequence: Synthetic oligonucleotide
tatcagagggaccttttctc

SEQ ID NO: 11981 - DNA, 20 bp, Artificial Sequence
  Description of Artificial Sequence: Synthetic oligonucleotide
atcagagggaccttttctcc

SEQ ID NO: 11982 - DNA, 20 bp, Artificial Sequence
  Description of Artificial Sequence: Synthetic oligonucleotide
tcagagggaccttttctccc

SEQ ID NO: 11983 - DNA, 20 bp, Artificial Sequence
  Description of Artificial Sequence: Synthetic oligonucleotide
cagagggaccttttctccct

SEQ ID NO: 11984 - DNA, 20 bp, Artificial Sequence
  Description of Artificial Sequence: Synthetic oligonucleotide
agagggaccttttctccctt

SEQ ID NO: 11985 - DNA, 20 bp, Artificial Sequence
  Description of Artificial Sequence: Synthetic oligonucleotide
gagggaccttttctcccttg

SEQ ID NO: 11986 - DNA, 20 bp, Artificial Sequence
  Description of Artificial Sequence: Synthetic oligonucleotide
agggaccttttctcccttga

SEQ ID NO: 11987 - DNA, 20 bp, Artificial Sequence
  Description of Artificial Sequence: Synthetic oligonucleotide
gggaccttttctcccttgat

SEQ ID NO: 11988 - DNA, 20 bp, Artificial Sequence
  Description of Artificial Sequence: Synthetic oligonucleotide
ggaccttttctcccttgatc

SEQ ID NO: 11989 - DNA, 20 bp, Artificial Sequence
  Description of Artificial Sequence: Synthetic oligonucleotide
gaccttttctcccttgatcc

SEQ ID NO: 11990 - DNA, 20 bp, Artificial Sequence
  Description of Artificial Sequence: Synthetic oligonucleotide
accttttctcccttgatcct

SEQ ID NO: 11991 - DNA, 20 bp, Artificial Sequence
  Description of Artificial Sequence: Synthetic oligonucleotide
ccttttctcccttgatccta

SEQ ID NO: 11992 - DNA, 20 bp, Artificial Sequence
  Description of Artificial Sequence: Synthetic oligonucleotide
cttttctcccttgatcctag

SEQ ID NO: 11993 - DNA, 20 bp, Artificial Sequence
  Description of Artificial Sequence: Synthetic oligonucleotide
ttttctcccttgatcctagg

SEQ ID NO: 11994 - DNA, 20 bp, Artificial Sequence
  Description of Artificial Sequence: Synthetic oligonucleotide
tttctcccttgatcctaggg

SEQ ID NO: 11995 - DNA, 20 bp, Artificial Sequence
  Description of Artificial Sequence: Synthetic oligonucleotide
ttctcccttgatcctagggt

SEQ ID NO: 11996 - DNA, 20 bp, Artificial Sequence
  Description of Artificial Sequence: Synthetic oligonucleotide
tctcccttgatcctagggtt

SEQ ID NO: 11997 - DNA, 20 bp, Artificial Sequence
  Description of Artificial Sequence: Synthetic oligonucleotide
ctcccttgatcctagggtta

SEQ ID NO: 11998 - DNA, 20 bp, Artificial Sequence
  Description of Artificial Sequence: Synthetic oligonucleotide
tcccttgatcctagggttac

SEQ ID NO: 11999 - DNA, 20 bp, Artificial Sequence
  Description of Artificial Sequence: Synthetic oligonucleotide
cccttgatcctagggttacc

SEQ ID NO: 12000 - DNA, 20 bp, Artificial Sequence
  Description of Artificial Sequence: Synthetic oligonucleotide
ccttgatcctagggttacct

SEQ ID NO: 12001 - DNA, 20 bp, Artificial Sequence
  Description of Artificial Sequence: Synthetic oligonucleotide
cttgatcctagggttacctg

SEQ ID NO: 12002 - DNA, 20 bp, Artificial Sequence
  Description of Artificial Sequence: Synthetic oligonucleotide
ttgatcctagggttacctgg

SEQ ID NO: 12003 - DNA, 20 bp, Artificial Sequence
  Description of Artificial Sequence: Synthetic oligonucleotide
tgatcctagggttacctggc

SEQ ID NO: 12004 - DNA, 20 bp, Artificial Sequence
  Description of Artificial Sequence: Synthetic oligonucleotide
gatcctagggttacctggct

SEQ ID NO: 12005 - DNA, 20 bp, Artificial Sequence
  Description of Artificial Sequence: Synthetic oligonucleotide
atcctagggttacctggctt

SEQ ID NO: 12006 - DNA, 20 bp, Artificial Sequence
  Description of Artificial Sequence: Synthetic oligonucleotide
tcctagggttacctggcttt

SEQ ID NO: 12007 - DNA, 20 bp, Artificial Sequence
  Description of Artificial Sequence: Synthetic oligonucleotide
cctagggttacctggctttg

SEQ ID NO: 12008 - DNA, 20 bp, Artificial Sequence
  Description of Artificial Sequence: Synthetic oligonucleotide
ctagggttacctggctttgc

SEQ ID NO: 12009 - DNA, 20 bp, Artificial Sequence
  Description of Artificial Sequence: Synthetic oligonucleotide
tagggttacctggctttgca

SEQ ID NO: 12010 - DNA, 20 bp, Artificial Sequence
  Description of Artificial Sequence: Synthetic oligonucleotide
agggttacctggctttgcag

SEQ ID NO: 12011 - DNA, 20 bp, Artificial Sequence
  Description of Artificial Sequence: Synthetic oligonucleotide
gggttacctggctttgcaga

SEQ ID NO: 12012 - DNA, 20 bp, Artificial Sequence
  Description of Artificial Sequence: Synthetic oligonucleotide
ggttacctggctttgcagat

SEQ ID NO: 12013 - DNA, 20 bp, Artificial Sequence
  Description of Artificial Sequence: Synthetic oligonucleotide
gttacctggctttgcagatg

SEQ ID NO: 12014 - DNA, 20 bp, Artificial Sequence
  Description of Artificial Sequence: Synthetic oligonucleotide
ttacctggctttgcagatgc

SEQ ID NO: 12015 - DNA, 20 bp, Artificial Sequence
  Description of Artificial Sequence: Synthetic oligonucleotide
tacctggctttgcagatgct

SEQ ID NO: 12016 - DNA, 20 bp, Artificial Sequence
  Description of Artificial Sequence: Synthetic oligonucleotide
acctggctttgcagatgctg

SEQ ID NO: 12017 - DNA, 20 bp, Artificial Sequence
  Description of Artificial Sequence: Synthetic oligonucleotide
cctggctttgcagatgctga

SEQ ID NO: 12018 - DNA, 20 bp, Artificial Sequence
  Description of Artificial Sequence: Synthetic oligonucleotide
ctggctttgcagatgctgaa

SEQ ID NO: 12019 - DNA, 20 bp, Artificial Sequence
  Description of Artificial Sequence: Synthetic oligonucleotide
tggctttgcagatgctgaat

SEQ ID NO: 12020 - DNA, 20 bp, Artificial Sequence
  Description of Artificial Sequence: Synthetic oligonucleotide
ggctttgcagatgctgaatt

SEQ ID NO: 12021 - DNA, 20 bp, Artificial Sequence
  Description of Artificial Sequence: Synthetic oligonucleotide
gctttgcagatgctgaattc

SEQ ID NO: 12022 - DNA, 20 bp, Artificial Sequence
  Description of Artificial Sequence: Synthetic oligonucleotide
ctttgcagatgctgaattcg

SEQ ID NO: 12023 - DNA, 20 bp, Artificial Sequence
  Description of Artificial Sequence: Synthetic oligonucleotide
tttgcagatgctgaattcgc

SEQ ID NO: 12024 - DNA, 20 bp, Artificial Sequence
  Description of Artificial Sequence: Synthetic oligonucleotide
ttgcagatgctgaattcgca

SEQ ID NO: 12025 - DNA, 20 bp, Artificial Sequence
  Description of Artificial Sequence: Synthetic oligonucleotide
tgcagatgctgaattcgcag

SEQ ID NO: 12026 - DNA, 20 bp, Artificial Sequence
  Description of Artificial Sequence: Synthetic oligonucleotide
gcagatgctgaattcgcagg

SEQ ID NO: 12027 - DNA, 20 bp, Artificial Sequence
  Description of Artificial Sequence: Synthetic oligonucleotide
cagatgctgaattcgcaggt

SEQ ID NO: 12028 - DNA, 20 bp, Artificial Sequence
  Description of Artificial Sequence: Synthetic oligonucleotide
agatgctgaattcgcaggtg

SEQ ID NO: 12029 - DNA, 20 bp, Artificial Sequence
  Description of Artificial Sequence: Synthetic oligonucleotide
gatgctgaattcgcaggtgc

SEQ ID NO: 12030 - DNA, 20 bp, Artificial Sequence
  Description of Artificial Sequence: Synthetic oligonucleotide
atgctgaattcgcaggtgct

SEQ ID NO: 12031 - DNA, 20 bp, Artificial Sequence
  Description of Artificial Sequence: Synthetic oligonucleotide
tgctgaattcgcaggtgctg

SEQ ID NO: 12032 - DNA, 20 bp, Artificial Sequence
  Description of Artificial Sequence: Synthetic oligonucleotide
gctgaattcgcaggtgctgc

SEQ ID NO: 12033 - DNA, 20 bp, Artificial Sequence
  Description of Artificial Sequence: Synthetic oligonucleotide
ctgaattcgcaggtgctgct

SEQ ID NO: 12034 - DNA, 20 bp, Artificial Sequence
  Description of Artificial Sequence: Synthetic oligonucleotide
tgaattcgcaggtgctgctt

SEQ ID NO: 12035 - DNA, 20 bp, Artificial Sequence
  Description of Artificial Sequence: Synthetic oligonucleotide
gaattcgcaggtgctgcttc

SEQ ID NO: 12036 - DNA, 20 bp, Artificial Sequence
  Description of Artificial Sequence: Synthetic oligonucleotide
aattcgcaggtgctgcttct

SEQ ID NO: 12037 - DNA, 20 bp, Artificial Sequence
  Description of Artificial Sequence: Synthetic oligonucleotide
attcgcaggtgctgcttctc

SEQ ID NO: 12038 - DNA, 20 bp, Artificial Sequence
  Description of Artificial Sequence: Synthetic oligonucleotide
ttcgcaggtgctgcttctcc

SEQ ID NO: 12039 - DNA, 20 bp, Artificial Sequence
  Description of Artificial Sequence: Synthetic oligonucleotide
tcgcaggtgctgcttctcca

SEQ ID NO: 12040 - DNA, 20 bp, Artificial Sequence
  Description of Artificial Sequence: Synthetic oligonucleotide
cgcaggtgctgcttctccag

SEQ ID NO: 12041 - DNA, 20 bp, Artificial Sequence
  Description of Artificial Sequence: Synthetic oligonucleotide
gcaggtgctgcttctccagg

SEQ ID NO: 12042 - DNA, 20 bp, Artificial Sequence
  Description of Artificial Sequence: Synthetic oligonucleotide
caggtgctgcttctccaggt

SEQ ID NO: 12043 - DNA, 20 bp, Artificial Sequence
  Description of Artificial Sequence: Synthetic oligonucleotide
aggtgctgcttctccaggtg

SEQ ID NO: 12044 - DNA, 20 bp, Artificial Sequence
  Description of Artificial Sequence: Synthetic oligonucleotide
ggtgctgcttctccaggtgc

SEQ ID NO: 12045 - DNA, 20 bp, Artificial Sequence
  Description of Artificial Sequence: Synthetic oligonucleotide
gtgctgcttctccaggtgcc

SEQ ID NO: 12046 - DNA, 20 bp, Artificial Sequence
  Description of Artificial Sequence: Synthetic oligonucleotide
tgctgcttctccaggtgccg

SEQ ID NO: 12047 - DNA, 20 bp, Artificial Sequence
  Description of Artificial Sequence: Synthetic oligonucleotide
gctgcttctccaggtgccgc

SEQ ID NO: 12048 - DNA, 20 bp, Artificial Sequence
  Description of Artificial Sequence: Synthetic oligonucleotide
ctgcttctccaggtgccgct

SEQ ID NO: 12049 - DNA, 20 bp, Artificial Sequence
  Description of Artificial Sequence: Synthetic oligonucleotide
tgcttctccaggtgccgctg

SEQ ID NO: 12050 - DNA, 20 bp, Artificial Sequence
  Description of Artificial Sequence: Synthetic oligonucleotide
gcttctccaggtgccgctgc

SEQ ID NO: 12051 - DNA, 20 bp, Artificial Sequence
  Description of Artificial Sequence: Synthetic oligonucleotide
cttctccaggtgccgctgct

SEQ ID NO: 12052 - DNA, 20 bp, Artificial Sequence
  Description of Artificial Sequence: Synthetic oligonucleotide
ttctccaggtgccgctgctg

SEQ ID NO: 12053 - DNA, 20 bp, Artificial Sequence
  Description of Artificial Sequence: Synthetic oligonucleotide
tctccaggtgccgctgctgc

SEQ ID NO: 12054 - DNA, 20 bp, Artificial Sequence
  Description of Artificial Sequence: Synthetic oligonucleotide
ctccaggtgccgctgctgct

SEQ ID NO: 12055 - DNA, 20 bp, Artificial Sequence
  Description of Artificial Sequence: Synthetic oligonucleotide
tccaggtgccgctgctgctg

SEQ ID NO: 12056 - DNA, 20 bp, Artificial Sequence
  Description of Artificial Sequence: Synthetic oligonucleotide
ccaggtgccgctgctgctgg

SEQ ID NO: 12057 - DNA, 20 bp, Artificial Sequence
  Description of Artificial Sequence: Synthetic oligonucleotide
caggtgccgctgctgctggg

SEQ ID NO: 12058 - DNA, 20 bp, Artificial Sequence
  Description of Artificial Sequence: Synthetic oligonucleotide
aggtgccgctgctgctgggc

SEQ ID NO: 12059 - DNA, 20 bp, Artificial Sequence
  Description of Artificial Sequence: Synthetic oligonucleotide
ggtgccgctgctgctgggcc

SEQ ID NO: 12060 - DNA, 20 bp, Artificial Sequence
  Description of Artificial Sequence: Synthetic oligonucleotide
gtgccgctgctgctgggcca

SEQ ID NO: 12061 - DNA, 20 bp, Artificial Sequence
  Description of Artificial Sequence: Synthetic oligonucleotide
tgccgctgctgctgggccac

SEQ ID NO: 12062 - DNA, 20 bp, Artificial Sequence
  Description of Artificial Sequence: Synthetic oligonucleotide
gccgctgctgctgggccacc

SEQ ID NO: 12063 - DNA, 20 bp, Artificial Sequence
  Description of Artificial Sequence: Synthetic oligonucleotide
ccgctgctgctgggccacct

SEQ ID NO: 12064 - DNA, 20 bp, Artificial Sequence
  Description of Artificial Sequence: Synthetic oligonucleotide
cgctgctgctgggccacctt

SEQ ID NO: 12065 - DNA, 20 bp, Artificial Sequence
  Description of Artificial Sequence: Synthetic oligonucleotide
gctgctgctgggccaccttg

SEQ ID NO: 12066 - DNA, 20 bp, Artificial Sequence
  Description of Artificial Sequence: Synthetic oligonucleotide
ctgctgctgggccaccttgt

SEQ ID NO: 12067 - DNA, 20 bp, Artificial Sequence
  Description of Artificial Sequence: Synthetic oligonucleotide
tgctgctgggccaccttgtg

SEQ ID NO: 12068 - DNA, 20 bp, Artificial Sequence
  Description of Artificial Sequence: Synthetic oligonucleotide
gctgctgggccaccttgtgg

SEQ ID NO: 12069 - DNA, 20 bp, Artificial Sequence
  Description of Artificial Sequence: Synthetic oligonucleotide
ctgctgggccaccttgtgga

SEQ ID NO: 12070 - DNA, 20 bp, Artificial Sequence
  Description of Artificial Sequence: Synthetic oligonucleotide
tgctgggccaccttgtggaa

SEQ ID NO: 12071 - DNA, 20 bp, Artificial Sequence
  Description of Artificial Sequence: Synthetic oligonucleotide
gctgggccaccttgtggaag

SEQ ID NO: 12072 - DNA, 20 bp, Artificial Sequence
  Description of Artificial Sequence: Synthetic oligonucleotide
ctgggccaccttgtggaaga

SEQ ID NO: 12073 - DNA, 20 bp, Artificial Sequence
  Description of Artificial Sequence: Synthetic oligonucleotide
tgggccaccttgtggaagag

SEQ ID NO: 12074 - DNA, 20 bp, Artificial Sequence
  Description of Artificial Sequence: Synthetic oligonucleotide
gggccaccttgtggaagagt

SEQ ID NO: 12075 - DNA, 20 bp, Artificial Sequence
  Description of Artificial Sequence: Synthetic oligonucleotide
ggccaccttgtggaagagtt

SEQ ID NO: 12076 - DNA, 20 bp, Artificial Sequence
  Description of Artificial Sequence: Synthetic oligonucleotide
gccaccttgtggaagagttg

SEQ ID NO: 12077 - DNA, 20 bp, Artificial Sequence
  Description of Artificial Sequence: Synthetic oligonucleotide
ccaccttgtggaagagttgc

SEQ ID NO: 12078 - DNA, 20 bp, Artificial Sequence
  Description of Artificial Sequence: Synthetic oligonucleotide
caccttgtggaagagttgct

SEQ ID NO: 12079 - DNA, 20 bp, Artificial Sequence
  Description of Artificial Sequence: Synthetic oligonucleotide
accttgtggaagagttgctg

SEQ ID NO: 12080 - DNA, 20 bp, Artificial Sequence
  Description of Artificial Sequence: Synthetic oligonucleotide
ccttgtggaagagttgctgg

SEQ ID NO: 12081 - DNA, 20 bp, Artificial Sequence
  Description of Artificial Sequence: Synthetic oligonucleotide
cttgtggaagagttgctgga

SEQ ID NO: 12082 - DNA, 20 bp, Artificial Sequence
  Description of Artificial Sequence: Synthetic oligonucleotide
ttgtggaagagttgctggat

SEQ ID NO: 12083 - DNA, 20 bp, Artificial Sequence
  Description of Artificial Sequence: Synthetic oligonucleotide
tgtggaagagttgctggatc

SEQ ID NO: 12084 - DNA, 20 bp, Artificial Sequence
  Description of Artificial Sequence: Synthetic oligonucleotide
gtggaagagttgctggatcc

SEQ ID NO: 12085 - DNA, 20 bp, Artificial Sequence
  Description of Artificial Sequence: Synthetic oligonucleotide
tggaagagttgctggatcct

SEQ ID NO: 12086 - DNA, 20 bp, Artificial Sequence
  Description of Artificial Sequence: Synthetic oligonucleotide
ggaagagttgctggatcctg

SEQ ID NO: 12087 - DNA, 20 bp, Artificial Sequence
  Description of Artificial Sequence: Synthetic oligonucleotide
gaagagttgctggatcctgc

SEQ ID NO: 12088 - DNA, 20 bp, Artificial Sequence
  Description of Artificial Sequence: Synthetic oligonucleotide
aagagttgctggatcctgct

SEQ ID NO: 12089 - DNA, 20 bp, Artificial Sequence
  Description of Artificial Sequence: Synthetic oligonucleotide
agagttgctggatcctgctg

SEQ ID NO: 12090 - DNA, 20 bp, Artificial Sequence
  Description of Artificial Sequence: Synthetic oligonucleotide
gagttgctggatcctgctgt

SEQ ID NO: 12091 - DNA, 20 bp, Artificial Sequence
  Description of Artificial Sequence: Synthetic oligonucleotide
agttgctggatcctgctgtt

SEQ ID NO: 12092 - DNA, 20 bp, Artificial Sequence
  Description of Artificial Sequence: Synthetic oligonucleotide
gttgctggatcctgctgttc

SEQ ID NO: 12093 - DNA, 20 bp, Artificial Sequence
  Description of Artificial Sequence: Synthetic oligonucleotide
ttgctggatcctgctgttct

SEQ ID NO: 12094 - DNA, 20 bp, Artificial Sequence
  Description of Artificial Sequence: Synthetic oligonucleotide
tgctggatcctgctgttctg

SEQ ID NO: 12095 - DNA, 20 bp, Artificial Sequence
  Description of Artificial Sequence: Synthetic oligonucleotide
gctggatcctgctgttctga

SEQ ID NO: 12096 - DNA, 20 bp, Artificial Sequence
  Description of Artificial Sequence: Synthetic oligonucleotide
ctggatcctgctgttctgag

SEQ ID NO: 12097 - DNA, 20 bp, Artificial Sequence
  Description of Artificial Sequence: Synthetic oligonucleotide
tggatcctgctgttctgagc

SEQ ID NO: 12098 - DNA, 20 bp, Artificial Sequence
  Description of Artificial Sequence: Synthetic oligonucleotide
ggatcctgctgttctgagcc

SEQ ID NO: 12099 - DNA, 20 bp, Artificial Sequence
  Description of Artificial Sequence: Synthetic oligonucleotide
gatcctgctgttctgagcct

SEQ ID NO: 12100 - DNA, 20 bp, Artificial Sequence
  Description of Artificial Sequence: Synthetic oligonucleotide
atcctgctgttctgagcctt

SEQ ID NO: 12101 - DNA, 20 bp, Artificial Sequence
  Description of Artificial Sequence: Synthetic oligonucleotide
tcctgctgttctgagccttg

SEQ ID NO: 12102 - DNA, 20 bp, Artificial Sequence
  Description of Artificial Sequence: Synthetic oligonucleotide
cctgctgttctgagccttga

SEQ ID NO: 12103 - DNA, 20 bp, Artificial Sequence
  Description of Artificial Sequence: Synthetic oligonucleotide
ctgctgttctgagccttgag

SEQ ID NO: 12104 - DNA, 20 bp, Artificial Sequence
  Description of Artificial Sequence: Synthetic oligonucleotide
tgctgttctgagccttgagt

SEQ ID NO: 12105 - DNA, 20 bp, Artificial Sequence
  Description of Artificial Sequence: Synthetic oligonucleotide
gctgttctgagccttgagtt

SEQ ID NO: 12106 - DNA, 20 bp, Artificial Sequence
  Description of Artificial Sequence: Synthetic oligonucleotide
ctgttctgagccttgagttg

SEQ ID NO: 12107 - DNA, 20 bp, Artificial Sequence
  Description of Artificial Sequence: Synthetic oligonucleotide
tgttctgagccttgagttgt

SEQ ID NO: 12108 - DNA, 20 bp, Artificial Sequence
  Description of Artificial Sequence: Synthetic oligonucleotide
gttctgagccttgagttgtg

SEQ ID NO: 12109 - DNA, 20 bp, Artificial Sequence
  Description of Artificial Sequence: Synthetic oligonucleotide
ttctgagccttgagttgtgt

SEQ ID NO: 12110 - DNA, 20 bp, Artificial Sequence
  Description of Artificial Sequence: Synthetic oligonucleotide
tctgagccttgagttgtgtc

SEQ ID NO: 12111 - DNA, 20 bp, Artificial Sequence
  Description of Artificial Sequence: Synthetic oligonucleotide
ctgagccttgagttgtgtct

SEQ ID NO: 12112 - DNA, 20 bp, Artificial Sequence
  Description of Artificial Sequence: Synthetic oligonucleotide
tgagccttgagttgtgtctg

SEQ ID NO: 12113 - DNA, 20 bp, Artificial Sequence
  Description of Artificial Sequence: Synthetic oligonucleotide
gagccttgagttgtgtctgg

SEQ ID NO: 12114 - DNA, 20 bp, Artificial Sequence
  Description of Artificial Sequence: Synthetic oligonucleotide
agccttgagttgtgtctggg

SEQ ID NO: 12115 - DNA, 20 bp, Artificial Sequence
  Description of Artificial Sequence: Synthetic oligonucleotide
gccttgagttgtgtctgggg

SEQ ID NO: 12116 - DNA, 20 bp, Artificial Sequence
  Description of Artificial Sequence: Synthetic oligonucleotide
ccttgagttgtgtctgggga

SEQ ID NO: 12117 - DNA, 20 bp, Artificial Sequence
  Description of Artificial Sequence: Synthetic oligonucleotide
cttgagttgtgtctggggag

SEQ ID NO: 12118 - DNA, 20 bp, Artificial Sequence
  Description of Artificial Sequence: Synthetic oligonucleotide
ttgagttgtgtctggggagg

SEQ ID NO: 12119 - DNA, 20 bp, Artificial Sequence
  Description of Artificial Sequence: Synthetic oligonucleotide
tgagttgtgtctggggaggg

SEQ ID NO: 12120 - DNA, 20 bp, Artificial Sequence
  Description of Artificial Sequence: Synthetic oligonucleotide
gagttgtgtctggggagggg

SEQ ID NO: 12121 - DNA, 20 bp, Artificial Sequence
  Description of Artificial Sequence: Synthetic oligonucleotide
agttgtgtctggggaggggt

SEQ ID NO: 12122 - DNA, 20 bp, Artificial Sequence
  Description of Artificial Sequence: Synthetic oligonucleotide
gttgtgtctggggaggggtg

SEQ ID NO: 12123 - DNA, 20 bp, Artificial Sequence
  Description of Artificial Sequence: Synthetic oligonucleotide
ttgtgtctggggaggggtga

SEQ ID NO: 12124 - DNA, 20 bp, Artificial Sequence
  Description of Artificial Sequence: Synthetic oligonucleotide
tgtgtctggggaggggtgaa

SEQ ID NO: 12125 - DNA, 20 bp, Artificial Sequence
  Description of Artificial Sequence: Synthetic oligonucleotide
gtgtctggggaggggtgaaa

SEQ ID NO: 12126 - DNA, 20 bp, Artificial Sequence
  Description of Artificial Sequence: Synthetic oligonucleotide
tgtctggggaggggtgaaaa

SEQ ID NO: 12127 - DNA, 20 bp, Artificial Sequence
  Description of Artificial Sequence: Synthetic oligonucleotide
gtctggggaggggtgaaaac

SEQ ID NO: 12128 - DNA, 20 bp, Artificial Sequence
  Description of Artificial Sequence: Synthetic oligonucleotide
tctggggaggggtgaaaacc

SEQ ID NO: 12129 - DNA, 20 bp, Artificial Sequence
  Description of Artificial Sequence: Synthetic oligonucleotide
ctggggaggggtgaaaacct

SEQ ID NO: 12130 - DNA, 20 bp, Artificial Sequence
  Description of Artificial Sequence: Synthetic oligonucleotide
tggggaggggtgaaaacctt

SEQ ID NO: 12131 - DNA, 20 bp, Artificial Sequence
  Description of Artificial Sequence: Synthetic oligonucleotide
ggggaggggtgaaaaccttg

SEQ ID NO: 12132 - DNA, 20 bp, Artificial Sequence
  Description of Artificial Sequence: Synthetic oligonucleotide
gggaggggtgaaaaccttgg

SEQ ID NO: 12133 - DNA, 20 bp, Artificial Sequence
  Description of Artificial Sequence: Synthetic oligonucleotide
ggaggggtgaaaaccttggt

SEQ ID NO: 12134 - DNA, 20 bp, Artificial Sequence
  Description of Artificial Sequence: Synthetic oligonucleotide
gaggggtgaaaaccttggtg

SEQ ID NO: 12135 - DNA, 20 bp, Artificial Sequence
  Description of Artificial Sequence: Synthetic oligonucleotide
aggggtgaaaaccttggtga

SEQ ID NO: 12136 - DNA, 20 bp, Artificial Sequence
  Description of Artificial Sequence: Synthetic oligonucleotide
ggggtgaaaaccttggtgag

SEQ ID NO: 12137 - DNA, 20 bp, Artificial Sequence
  Description of Artificial Sequence: Synthetic oligonucleotide
gggtgaaaaccttggtgagg

SEQ ID NO: 12138 - DNA, 20 bp, Artificial Sequence
  Description of Artificial Sequence: Synthetic oligonucleotide
ggtgaaaaccttggtgagga

SEQ ID NO: 12139 - DNA, 20 bp, Artificial Sequence
  Description of Artificial Sequence: Synthetic oligonucleotide
gtgaaaaccttggtgaggac

SEQ ID NO: 12140 - DNA, 20 bp, Artificial Sequence
  Description of Artificial Sequence: Synthetic oligonucleotide
tgaaaaccttggtgaggacc

SEQ ID NO: 12141 - DNA, 20 bp, Artificial Sequence
  Description of Artificial Sequence: Synthetic oligonucleotide
gaaaaccttggtgaggaccc

SEQ ID NO: 12142 - DNA, 20 bp, Artificial Sequence
  Description of Artificial Sequence: Synthetic oligonucleotide
aaaaccttggtgaggaccca

SEQ ID NO: 12143 - DNA, 20 bp, Artificial Sequence
  Description of Artificial Sequence: Synthetic oligonucleotide
aaaccttggtgaggacccag

SEQ ID NO: 12144 - DNA, 20 bp, Artificial Sequence
  Description of Artificial Sequence: Synthetic oligonucleotide
aaccttggtgaggacccagc

SEQ ID NO: 12145 - DNA, 20 bp, Artificial Sequence
  Description of Artificial Sequence: Synthetic oligonucleotide
accttggtgaggacccagct

SEQ ID NO: 12146 - DNA, 20 bp, Artificial Sequence
  Description of Artificial Sequence: Synthetic oligonucleotide
ccttggtgaggacccagctt

SEQ ID NO: 12147 - DNA, 20 bp, Artificial Sequence
  Description of Artificial Sequence: Synthetic oligonucleotide
cttggtgaggacccagcttg

SEQ ID NO: 12148 - DNA, 20 bp, Artificial Sequence
  Description of Artificial Sequence: Synthetic oligonucleotide
ttggtgaggacccagcttgc

SEQ ID NO: 12149 - DNA, 20 bp, Artificial Sequence
  Description of Artificial Sequence: Synthetic oligonucleotide
tggtgaggacccagcttgcc

SEQ ID NO: 12150 - DNA, 20 bp, Artificial Sequence
  Description of Artificial Sequence: Synthetic oligonucleotide
ggtgaggacccagcttgcct

SEQ ID NO: 12151 - DNA, 20 bp, Artificial Sequence
  Description of Artificial Sequence: Synthetic oligonucleotide
gtgaggacccagcttgccta

SEQ ID NO: 12152 - DNA, 20 bp, Artificial Sequence
  Description of Artificial Sequence: Synthetic oligonucleotide
tgaggacccagcttgcctac

SEQ ID NO: 12153 - DNA, 20 bp, Artificial Sequence
  Description of Artificial Sequence: Synthetic oligonucleotide
gaggacccagcttgcctacc

SEQ ID NO: 12154 - DNA, 20 bp, Artificial Sequence
  Description of Artificial Sequence: Synthetic oligonucleotide
aggacccagcttgcctaccc

SEQ ID NO: 12155 - DNA, 20 bp, Artificial Sequence
  Description of Artificial Sequence: Synthetic oligonucleotide
ggacccagcttgcctacccc

SEQ ID NO: 12156 - DNA, 20 bp, Artificial Sequence
  Description of Artificial Sequence: Synthetic oligonucleotide
gacccagcttgcctacccca

SEQ ID NO: 12157 - DNA, 20 bp, Artificial Sequence
  Description of Artificial Sequence: Synthetic oligonucleotide
acccagcttgcctaccccaa

SEQ ID NO: 12158 - DNA, 20 bp, Artificial Sequence
  Description of Artificial Sequence: Synthetic oligonucleotide
cccagcttgcctaccccaac

SEQ ID NO: 12159 - DNA, 20 bp, Artificial Sequence
  Description of Artificial Sequence: Synthetic oligonucleotide
ccagcttgcctaccccaacc

SEQ ID NO: 12160 - DNA, 20 bp, Artificial Sequence
  Description of Artificial Sequence: Synthetic oligonucleotide
cagcttgcctaccccaacct

SEQ ID NO: 12161 - DNA, 20 bp, Artificial Sequence
  Description of Artificial Sequence: Synthetic oligonucleotide
agcttgcctaccccaacctc

SEQ ID NO: 12162 - DNA, 20 bp, Artificial Sequence
  Description of Artificial Sequence: Synthetic oligonucleotide
gcttgcctaccccaacctct

SEQ ID NO: 12163 - DNA, 20 bp, Artificial Sequence
  Description of Artificial Sequence: Synthetic oligonucleotide
cttgcctaccccaacctctt

SEQ ID NO: 12164 - DNA, 20 bp, Artificial Sequence
  Description of Artificial Sequence: Synthetic oligonucleotide
ttgcctaccccaacctctta

SEQ ID NO: 12165 - DNA, 20 bp, Artificial Sequence
  Description of Artificial Sequence: Synthetic oligonucleotide
tgcctaccccaacctcttaa

SEQ ID NO: 12166 - DNA, 20 bp, Artificial Sequence
  Description of Artificial Sequence: Synthetic oligonucleotide
gcctaccccaacctcttaat

SEQ ID NO: 12167 - DNA, 20 bp, Artificial Sequence
  Description of Artificial Sequence: Synthetic oligonucleotide
cctaccccaacctcttaatt

SEQ ID NO: 12168 - DNA, 20 bp, Artificial Sequence
  Description of Artificial Sequence: Synthetic oligonucleotide
ctaccccaacctcttaattc

SEQ ID NO: 12169 - DNA, 20 bp, Artificial Sequence
  Description of Artificial Sequence: Synthetic oligonucleotide
taccccaacctcttaattca

SEQ ID NO: 12170 - DNA, 20 bp, Artificial Sequence
  Description of Artificial Sequence: Synthetic oligonucleotide
accccaacctcttaattcat

SEQ ID NO: 12171 - DNA, 20 bp, Artificial Sequence
  Description of Artificial Sequence: Synthetic oligonucleotide
ccccaacctcttaattcatc

SEQ ID NO: 12172 - DNA, 20 bp, Artificial Sequence
  Description of Artificial Sequence: Synthetic oligonucleotide
cccaacctcttaattcatcc

SEQ ID NO: 12173 - DNA, 20 bp, Artificial Sequence
  Description of Artificial Sequence: Synthetic oligonucleotide
ccaacctcttaattcatcca

SEQ ID NO: 12174 - DNA, 20 bp, Artificial Sequence
  Description of Artificial Sequence: Synthetic oligonucleotide
caacctcttaattcatccac

SEQ ID NO: 12175 - DNA, 20 bp, Artificial Sequence
  Description of Artificial Sequence: Synthetic oligonucleotide
aacctcttaattcatccact

SEQ ID NO: 12176 - DNA, 20 bp, Artificial Sequence
  Description of Artificial Sequence: Synthetic oligonucleotide
acctcttaattcatccactc

SEQ ID NO: 12177 - DNA, 20 bp, Artificial Sequence
  Description of Artificial Sequence: Synthetic oligonucleotide
cctcttaattcatccactca

SEQ ID NO: 12178 - DNA, 20 bp, Artificial Sequence
  Description of Artificial Sequence: Synthetic oligonucleotide
ctcttaattcatccactcat

SEQ ID NO: 12179 - DNA, 20 bp, Artificial Sequence
  Description of Artificial Sequence: Synthetic oligonucleotide
tcttaattcatccactcatc

SEQ ID NO: 12180 - DNA, 20 bp, Artificial Sequence
  Description of Artificial Sequence: Synthetic oligonucleotide
cttaattcatccactcatcc

SEQ ID NO: 12181 - DNA, 20 bp, Artificial Sequence
  Description of Artificial Sequence: Synthetic oligonucleotide
ttaattcatccactcatcca

SEQ ID NO: 12182 - DNA, 20 bp, Artificial Sequence
  Description of Artificial Sequence: Synthetic oligonucleotide
taattcatccactcatccat

SEQ ID NO: 12183 - DNA, 20 bp, Artificial Sequence
  Description of Artificial Sequence: Synthetic oligonucleotide
aattcatccactcatccatc

SEQ ID NO: 12184 - DNA, 20 bp, Artificial Sequence
  Description of Artificial Sequence: Synthetic oligonucleotide
attcatccactcatccatcc

SEQ ID NO: 12185 - DNA, 20 bp, Artificial Sequence
  Description of Artificial Sequence: Synthetic oligonucleotide
ttcatccactcatccatcct

SEQ ID NO: 12186 - DNA, 20 bp, Artificial Sequence
  Description of Artificial Sequence: Synthetic oligonucleotide
tcatccactcatccatcctt

SEQ ID NO: 12187 - DNA, 20 bp, Artificial Sequence
  Description of Artificial Sequence: Synthetic oligonucleotide
catccactcatccatccttc

SEQ ID NO: 12188 - DNA, 20 bp, Artificial Sequence
  Description of Artificial Sequence: Synthetic oligonucleotide
atccactcatccatccttcc

SEQ ID NO: 12189 - DNA, 20 bp, Artificial Sequence
  Description of Artificial Sequence: Synthetic oligonucleotide
tccactcatccatccttcca

SEQ ID NO: 12190 - DNA, 20 bp, Artificial Sequence
  Description of Artificial Sequence: Synthetic oligonucleotide
ccactcatccatccttccaa

SEQ ID NO: 12191 - DNA, 20 bp, Artificial Sequence
  Description of Artificial Sequence: Synthetic oligonucleotide
cactcatccatccttccaaa

SEQ ID NO: 12192 - DNA, 20 bp, Artificial Sequence
  Description of Artificial Sequence: Synthetic oligonucleotide
actcatccatccttccaaat

SEQ ID NO: 12193 - DNA, 20 bp, Artificial Sequence
  Description of Artificial Sequence: Synthetic oligonucleotide
ctcatccatccttccaaatc

SEQ ID NO: 12194 - DNA, 20 bp, Artificial Sequence
  Description of Artificial Sequence: Synthetic oligonucleotide
tcatccatccttccaaatct

SEQ ID NO: 12195 - DNA, 20 bp, Artificial Sequence
  Description of Artificial Sequence: Synthetic oligonucleotide
catccatccttccaaatctc

SEQ ID NO: 12196 - DNA, 20 bp, Artificial Sequence
  Description of Artificial Sequence: Synthetic oligonucleotide
atccatccttccaaatctcc

SEQ ID NO: 12197 - DNA, 20 bp, Artificial Sequence
  Description of Artificial Sequence: Synthetic oligonucleotide
tccatccttccaaatctcca

SEQ ID NO: 12198 - DNA, 20 bp, Artificial Sequence
  Description of Artificial Sequence: Synthetic oligonucleotide
ccatccttccaaatctccat

SEQ ID NO: 12199 - DNA, 20 bp, Artificial Sequence
  Description of Artificial Sequence: Synthetic oligonucleotide
catccttccaaatctccatc

SEQ ID NO: 12200 - DNA, 20 bp, Artificial Sequence
  Description of Artificial Sequence: Synthetic oligonucleotide
atccttccaaatctccatcc

SEQ ID NO: 12201 - DNA, 20 bp, Artificial Sequence
  Description of Artificial Sequence: Synthetic oligonucleotide
tccttccaaatctccatccg

SEQ ID NO: 12202 - DNA, 20 bp, Artificial Sequence
  Description of Artificial Sequence: Synthetic oligonucleotide
ccttccaaatctccatccgc

SEQ ID NO: 12203 - DNA, 20 bp, Artificial Sequence
  Description of Artificial Sequence: Synthetic oligonucleotide
cttccaaatctccatccgct

SEQ ID NO: 12204 - DNA, 20 bp, Artificial Sequence
  Description of Artificial Sequence: Synthetic oligonucleotide
ttccaaatctccatccgctg

SEQ ID NO: 12205 - DNA, 20 bp, Artificial Sequence
  Description of Artificial Sequence: Synthetic oligonucleotide
tccaaatctccatccgctga

SEQ ID NO: 12206 - DNA, 20 bp, Artificial Sequence
  Description of Artificial Sequence: Synthetic oligonucleotide
ccaaatctccatccgctgag

SEQ ID NO: 12207 - DNA, 20 bp, Artificial Sequence
  Description of Artificial Sequence: Synthetic oligonucleotide
caaatctccatccgctgagg

SEQ ID NO: 12208 - DNA, 20 bp, Artificial Sequence
  Description of Artificial Sequence: Synthetic oligonucleotide
aaatctccatccgctgaggc

SEQ ID NO: 12209 - DNA, 20 bp, Artificial Sequence
  Description of Artificial Sequence: Synthetic oligonucleotide
aatctccatccgctgaggcc

SEQ ID NO: 12210 - DNA, 20 bp, Artificial Sequence
  Description of Artificial Sequence: Synthetic oligonucleotide
atctccatccgctgaggcca

SEQ ID NO: 12211 - DNA, 20 bp, Artificial Sequence
  Description of Artificial Sequence: Synthetic oligonucleotide
tctccatccgctgaggccag

SEQ ID NO: 12212 - DNA, 20 bp, Artificial Sequence
  Description of Artificial Sequence: Synthetic oligonucleotide
ctccatccgctgaggccagg

SEQ ID NO: 12213 - DNA, 20 bp, Artificial Sequence
  Description of Artificial Sequence: Synthetic oligonucleotide
tccatccgctgaggccaggc

SEQ ID NO: 12214 - DNA, 20 bp, Artificial Sequence
  Description of Artificial Sequence: Synthetic oligonucleotide
ccatccgctgaggccaggca

SEQ ID NO: 12215 - DNA, 20 bp, Artificial Sequence
  Description of Artificial Sequence: Synthetic oligonucleotide
catccgctgaggccaggcaa

SEQ ID NO: 12216 - DNA, 20 bp, Artificial Sequence
  Description of Artificial Sequence: Synthetic oligonucleotide
atccgctgaggccaggcaag

SEQ ID NO: 12217 - DNA, 20 bp, Artificial Sequence
  Description of Artificial Sequence: Synthetic oligonucleotide
tccgctgaggccaggcaagg

SEQ ID NO: 12218 - DNA, 20 bp, Artificial Sequence
  Description of Artificial Sequence: Synthetic oligonucleotide
ccgctgaggccaggcaaggg

SEQ ID NO: 12219 - DNA, 20 bp, Artificial Sequence
  Description of Artificial Sequence: Synthetic oligonucleotide
cgctgaggccaggcaaggga

SEQ ID NO: 12220 - DNA, 20 bp, Artificial Sequence
  Description of Artificial Sequence: Synthetic oligonucleotide
gctgaggccaggcaagggag

SEQ ID NO: 12221 - DNA, 20 bp, Artificial Sequence
  Description of Artificial Sequence: Synthetic oligonucleotide
ctgaggccaggcaagggagt

SEQ ID NO: 12222 - DNA, 20 bp, Artificial Sequence
  Description of Artificial Sequence: Synthetic oligonucleotide
tgaggccaggcaagggagtc

SEQ ID NO: 12223 - DNA, 20 bp, Artificial Sequence
  Description of Artificial Sequence: Synthetic oligonucleotide
gaggccaggcaagggagtct

SEQ ID NO: 12224 - DNA, 20 bp, Artificial Sequence
  Description of Artificial Sequence: Synthetic oligonucleotide
aggccaggcaagggagtctt

SEQ ID NO: 12225 - DNA, 20 bp, Artificial Sequence
  Description of Artificial Sequence: Synthetic oligonucleotide
ggccaggcaagggagtcttt

SEQ ID NO: 12226 - DNA, 20 bp, Artificial Sequence
  Description of Artificial Sequence: Synthetic oligonucleotide
gccaggcaagggagtctttc

SEQ ID NO: 12227 - DNA, 20 bp, Artificial Sequence
  Description of Artificial Sequence: Synthetic oligonucleotide
ccaggcaagggagtctttct

SEQ ID NO: 12228 - DNA, 20 bp, Artificial Sequence
  Description of Artificial Sequence: Synthetic oligonucleotide
caggcaagggagtctttctt

SEQ ID NO: 12229 - DNA, 20 bp, Artificial Sequence
  Description of Artificial Sequence: Synthetic oligonucleotide
aggcaagggagtctttcttt

SEQ ID NO: 12230 - DNA, 20 bp, Artificial Sequence
  Description of Artificial Sequence: Synthetic oligonucleotide
ggcaagggagtctttctttt

SEQ ID NO: 12231 - DNA, 20 bp, Artificial Sequence
  Description of Artificial Sequence: Synthetic oligonucleotide
gcaagggagtctttcttttt

SEQ ID NO: 12232 - DNA, 20 bp, Artificial Sequence
  Description of Artificial Sequence: Synthetic oligonucleotide
caagggagtctttctttttt

SEQ ID NO: 12233 - DNA, 20 bp, Artificial Sequence
  Description of Artificial Sequence: Synthetic oligonucleotide
aagggagtctttcttttttc

SEQ ID NO: 12234 - DNA, 20 bp, Artificial Sequence
  Description of Artificial Sequence: Synthetic oligonucleotide
agggagtctttcttttttct

SEQ ID NO: 12235 - DNA, 20 bp, Artificial Sequence
  Description of Artificial Sequence: Synthetic oligonucleotide
gggagtctttcttttttctt

SEQ ID NO: 12236 - DNA, 20 bp, Artificial Sequence
  Description of Artificial Sequence: Synthetic oligonucleotide
ggagtctttcttttttcttt

SEQ ID NO: 12237 - DNA, 20 bp, Artificial Sequence
  Description of Artificial Sequence: Synthetic oligonucleotide
gagtctttcttttttctttt

SEQ ID NO: 12238 - DNA, 20 bp, Artificial Sequence
  Description of Artificial Sequence: Synthetic oligonucleotide
agtctttcttttttcttttt

SEQ ID NO: 12239 - DNA, 20 bp, Artificial Sequence
  Description of Artificial Sequence: Synthetic oligonucleotide
gtctttcttttttctttttt

SEQ ID NO: 12240 - DNA, 20 bp, Artificial Sequence
  Description of Artificial Sequence: Synthetic oligonucleotide
tctttcttttttcttttttt

SEQ ID NO: 12241 - DNA, 20 bp, Artificial Sequence
  Description of Artificial Sequence: Synthetic oligonucleotide
ctttcttttttctttttttt

SEQ ID NO: 12242 - DNA, 20 bp, Artificial Sequence
  Description of Artificial Sequence: Synthetic oligonucleotide
tttcttttttcttttttttc

SEQ ID NO: 12243 - DNA, 20 bp, Artificial Sequence
  Description of Artificial Sequence: Synthetic oligonucleotide
ttcttttttcttttttttcc

SEQ ID NO: 12244 - DNA, 20 bp, Artificial Sequence
  Description of Artificial Sequence: Synthetic oligonucleotide
tcttttttcttttttttccc

SEQ ID NO: 12245 - DNA, 20 bp, Artificial Sequence
  Description of Artificial Sequence: Synthetic oligonucleotide
cttttttcttttttttccca

SEQ ID NO: 12246 - DNA, 20 bp, Artificial Sequence
  Description of Artificial Sequence: Synthetic oligonucleotide
ttttttcttttttttcccaa

SEQ ID NO: 12247 - DNA, 20 bp, Artificial Sequence
  Description of Artificial Sequence: Synthetic oligonucleotide
tttttcttttttttcccaat

SEQ ID NO: 12248 - DNA, 20 bp, Artificial Sequence
  Description of Artificial Sequence: Synthetic oligonucleotide
ttttcttttttttcccaatg

SEQ ID NO: 12249 - DNA, 20 bp, Artificial Sequence
  Description of Artificial Sequence: Synthetic oligonucleotide
tttcttttttttcccaatga

SEQ ID NO: 12250 - DNA, 20 bp, Artificial Sequence
  Description of Artificial Sequence: Synthetic oligonucleotide
ttcttttttttcccaatgac

SEQ ID NO: 12251 - DNA, 20 bp, Artificial Sequence
  Description of Artificial Sequence: Synthetic oligonucleotide
tcttttttttcccaatgacg

SEQ ID NO: 12252 - DNA, 20 bp, Artificial Sequence
  Description of Artificial Sequence: Synthetic oligonucleotide
cttttttttcccaatgacgg

SEQ ID NO: 12253 - DNA, 20 bp, Artificial Sequence
  Description of Artificial Sequence: Synthetic oligonucleotide
ttttttttcccaatgacggg

SEQ ID NO: 12254 - DNA, 20 bp, Artificial Sequence
  Description of Artificial Sequence: Synthetic oligonucleotide
tttttttcccaatgacgggg

SEQ ID NO: 12255 - DNA, 20 bp, Artificial Sequence
  Description of Artificial Sequence: Synthetic oligonucleotide
ttttttcccaatgacggggt

SEQ ID NO: 12256 - DNA, 20 bp, Artificial Sequence
  Description of Artificial Sequence: Synthetic oligonucleotide
tttttcccaatgacggggtc

SEQ ID NO: 12257 - DNA, 20 bp, Artificial Sequence
  Description of Artificial Sequence: Synthetic oligonucleotide
ttttcccaatgacggggtct

SEQ ID NO: 12258 - DNA, 20 bp, Artificial Sequence
  Description of Artificial Sequence: Synthetic oligonucleotide
tttcccaatgacggggtctc

SEQ ID NO: 12259 - DNA, 20 bp, Artificial Sequence
  Description of Artificial Sequence: Synthetic oligonucleotide
ttcccaatgacggggtctcg

SEQ ID NO: 12260 - DNA, 20 bp, Artificial Sequence
  Description of Artificial Sequence: Synthetic oligonucleotide
tcccaatgacggggtctcgt

SEQ ID NO: 12261 - DNA, 20 bp, Artificial Sequence
  Description of Artificial Sequence: Synthetic oligonucleotide
cccaatgacggggtctcgtt

SEQ ID NO: 12262 - DNA, 20 bp, Artificial Sequence
  Description of Artificial Sequence: Synthetic oligonucleotide
ccaatgacggggtctcgttc

SEQ ID NO: 12263 - DNA, 20 bp, Artificial Sequence
  Description of Artificial Sequence: Synthetic oligonucleotide
caatgacggggtctcgttct

SEQ ID NO: 12264 - DNA, 20 bp, Artificial Sequence
  Description of Artificial Sequence: Synthetic oligonucleotide
aatgacggggtctcgttctc

SEQ ID NO: 12265 - DNA, 20 bp, Artificial Sequence
  Description of Artificial Sequence: Synthetic oligonucleotide
atgacggggtctcgttctct

SEQ ID NO: 12266 - DNA, 20 bp, Artificial Sequence
  Description of Artificial Sequence: Synthetic oligonucleotide
tgacggggtctcgttctctc

SEQ ID NO: 12267 - DNA, 20 bp, Artificial Sequence
  Description of Artificial Sequence: Synthetic oligonucleotide
gacggggtctcgttctctcg

SEQ ID NO: 12268 - DNA, 20 bp, Artificial Sequence
  Description of Artificial Sequence: Synthetic oligonucleotide
acggggtctcgttctctcgc

SEQ ID NO: 12269 - DNA, 20 bp, Artificial Sequence
  Description of Artificial Sequence: Synthetic oligonucleotide
cggggtctcgttctctcgcc

SEQ ID NO: 12270 - DNA, 20 bp, Artificial Sequence
  Description of Artificial Sequence: Synthetic oligonucleotide
ggggtctcgttctctcgccc

SEQ ID NO: 12271 - DNA, 20 bp, Artificial Sequence
  Description of Artificial Sequence: Synthetic oligonucleotide
gggtctcgttctctcgccca

SEQ ID NO: 12272 - DNA, 20 bp, Artificial Sequence
  Description of Artificial Sequence: Synthetic oligonucleotide
ggtctcgttctctcgcccag

SEQ ID NO: 12273 - DNA, 20 bp, Artificial Sequence
  Description of Artificial Sequence: Synthetic oligonucleotide
gtctcgttctctcgcccagg

SEQ ID NO: 12274 - DNA, 20 bp, Artificial Sequence
  Description of Artificial Sequence: Synthetic oligonucleotide
tctcgttctctcgcccaggc

SEQ ID NO: 12275 - DNA, 20 bp, Artificial Sequence
  Description of Artificial Sequence: Synthetic oligonucleotide
ctcgttctctcgcccaggct

SEQ ID NO: 12276 - DNA, 20 bp, Artificial Sequence
  Description of Artificial Sequence: Synthetic oligonucleotide
tcgttctctcgcccaggctg

SEQ ID NO: 12277 - DNA, 20 bp, Artificial Sequence
  Description of Artificial Sequence: Synthetic oligonucleotide
cgttctctcgcccaggctgg

SEQ ID NO: 12278 - DNA, 20 bp, Artificial Sequence
  Description of Artificial Sequence: Synthetic oligonucleotide
gttctctcgcccaggctgga

SEQ ID NO: 12279 - DNA, 20 bp, Artificial Sequence
  Description of Artificial Sequence: Synthetic oligonucleotide
ttctctcgcccaggctggag

SEQ ID NO: 12280 - DNA, 20 bp, Artificial Sequence
  Description of Artificial Sequence: Synthetic oligonucleotide
tctctcgcccaggctggagt

SEQ ID NO: 12281 - DNA, 20 bp, Artificial Sequence
  Description of Artificial Sequence: Synthetic oligonucleotide
ctctcgcccaggctggagtg

SEQ ID NO: 12282 - DNA, 20 bp, Artificial Sequence
  Description of Artificial Sequence: Synthetic oligonucleotide
tctcgcccaggctggagtgc

SEQ ID NO: 12283 - DNA, 20 bp, Artificial Sequence
  Description of Artificial Sequence: Synthetic oligonucleotide
ctcgcccaggctggagtgca

SEQ ID NO: 12284 - DNA, 20 bp, Artificial Sequence
  Description of Artificial Sequence: Synthetic oligonucleotide
tcgcccaggctggagtgcag

SEQ ID NO: 12285 - DNA, 20 bp, Artificial Sequence
  Description of Artificial Sequence: Synthetic oligonucleotide
cgcccaggctggagtgcagt

SEQ ID NO: 12286 - DNA, 20 bp, Artificial Sequence
  Description of Artificial Sequence: Synthetic oligonucleotide
gcccaggctggagtgcagtg

SEQ ID NO: 12287 - DNA, 20 bp, Artificial Sequence
  Description of Artificial Sequence: Synthetic oligonucleotide
cccaggctggagtgcagtgg

SEQ ID NO: 12288 - DNA, 20 bp, Artificial Sequence
  Description of Artificial Sequence: Synthetic oligonucleotide
ccaggctggagtgcagtggt

SEQ ID NO: 12289 - DNA, 20 bp, Artificial Sequence
  Description of Artificial Sequence: Synthetic oligonucleotide
caggctggagtgcagtggtg

SEQ ID NO: 12290 - DNA, 20 bp, Artificial Sequence
  Description of Artificial Sequence: Synthetic oligonucleotide
aggctggagtgcagtggtgc

SEQ ID NO: 12291 - DNA, 20 bp, Artificial Sequence
  Description of Artificial Sequence: Synthetic oligonucleotide
ggctggagtgcagtggtgct

SEQ ID NO: 12292 - DNA, 20 bp, Artificial Sequence
  Description of Artificial Sequence: Synthetic oligonucleotide
gctggagtgcagtggtgctg

SEQ ID NO: 12293 - DNA, 20 bp, Artificial Sequence
  Description of Artificial Sequence: Synthetic oligonucleotide
ctggagtgcagtggtgctgt

SEQ ID NO: 12294 - DNA, 20 bp, Artificial Sequence
  Description of Artificial Sequence: Synthetic oligonucleotide
tggagtgcagtggtgctgtc

SEQ ID NO: 12295 - DNA, 20 bp, Artificial Sequence
  Description of Artificial Sequence: Synthetic oligonucleotide
ggagtgcagtggtgctgtca

SEQ ID NO: 12296 - DNA, 20 bp, Artificial Sequence
  Description of Artificial Sequence: Synthetic oligonucleotide
gagtgcagtggtgctgtcac

SEQ ID NO: 12297 - DNA, 20 bp, Artificial Sequence
  Description of Artificial Sequence: Synthetic oligonucleotide
agtgcagtggtgctgtcaca

SEQ ID NO: 12298 - DNA, 20 bp, Artificial Sequence
  Description of Artificial Sequence: Synthetic oligonucleotide
gtgcagtggtgctgtcacag

SEQ ID NO: 12299 - DNA, 20 bp, Artificial Sequence
  Description of Artificial Sequence: Synthetic oligonucleotide
tgcagtggtgctgtcacagc

SEQ ID NO: 12300 - DNA, 20 bp, Artificial Sequence
  Description of Artificial Sequence: Synthetic oligonucleotide
gcagtggtgctgtcacagct

SEQ ID NO: 12301 - DNA, 20 bp, Artificial Sequence
  Description of Artificial Sequence: Synthetic oligonucleotide
cagtggtgctgtcacagctc

SEQ ID NO: 12302 - DNA, 20 bp, Artificial Sequence
  Description of Artificial Sequence: Synthetic oligonucleotide
agtggtgctgtcacagctca

SEQ ID NO: 12303 - DNA, 20 bp, Artificial Sequence
  Description of Artificial Sequence: Synthetic oligonucleotide
gtggtgctgtcacagctcac

SEQ ID NO: 12304 - DNA, 20 bp, Artificial Sequence
  Description of Artificial Sequence: Synthetic oligonucleotide
tggtgctgtcacagctcact

SEQ ID NO: 12305 - DNA, 20 bp, Artificial Sequence
  Description of Artificial Sequence: Synthetic oligonucleotide
ggtgctgtcacagctcactg

SEQ ID NO: 12306 - DNA, 20 bp, Artificial Sequence
  Description of Artificial Sequence: Synthetic oligonucleotide
gtgctgtcacagctcactgc

SEQ ID NO: 12307 - DNA, 20 bp, Artificial Sequence
  Description of Artificial Sequence: Synthetic oligonucleotide
tgctgtcacagctcactgca

SEQ ID NO: 12308 - DNA, 20 bp, Artificial Sequence
  Description of Artificial Sequence: Synthetic oligonucleotide
gctgtcacagctcactgcag

SEQ ID NO: 12309 - DNA, 20 bp, Artificial Sequence
  Description of Artificial Sequence: Synthetic oligonucleotide
ctgtcacagctcactgcagc

SEQ ID NO: 12310 - DNA, 20 bp, Artificial Sequence
  Description of Artificial Sequence: Synthetic oligonucleotide
tgtcacagctcactgcagcc

SEQ ID NO: 12311 - DNA, 20 bp, Artificial Sequence
  Description of Artificial Sequence: Synthetic oligonucleotide
gtcacagctcactgcagcct

SEQ ID NO: 12312 - DNA, 20 bp, Artificial Sequence
  Description of Artificial Sequence: Synthetic oligonucleotide
tcacagctcactgcagcctc

SEQ ID NO: 12313 - DNA, 20 bp, Artificial Sequence
  Description of Artificial Sequence: Synthetic oligonucleotide
cacagctcactgcagcctcc

SEQ ID NO: 12314 - DNA, 20 bp, Artificial Sequence
  Description of Artificial Sequence: Synthetic oligonucleotide
acagctcactgcagcctcca

SEQ ID NO: 12315 - DNA, 20 bp, Artificial Sequence
  Description of Artificial Sequence: Synthetic oligonucleotide
cagctcactgcagcctccaa

SEQ ID NO: 12316 - DNA, 20 bp, Artificial Sequence
  Description of Artificial Sequence: Synthetic oligonucleotide
agctcactgcagcctccaac

SEQ ID NO: 12317 - DNA, 20 bp, Artificial Sequence
  Description of Artificial Sequence: Synthetic oligonucleotide
gctcactgcagcctccaact

SEQ ID NO: 12318 - DNA, 20 bp, Artificial Sequence
  Description of Artificial Sequence: Synthetic oligonucleotide
ctcactgcagcctccaactc

SEQ ID NO: 12319 - DNA, 20 bp, Artificial Sequence
  Description of Artificial Sequence: Synthetic oligonucleotide
tcactgcagcctccaactcc

SEQ ID NO: 12320 - DNA, 20 bp, Artificial Sequence
  Description of Artificial Sequence: Synthetic oligonucleotide
cactgcagcctccaactcct

SEQ ID NO: 12321 - DNA, 20 bp, Artificial Sequence
  Description of Artificial Sequence: Synthetic oligonucleotide
actgcagcctccaactcctg

SEQ ID NO: 12322 - DNA, 20 bp, Artificial Sequence
  Description of Artificial Sequence: Synthetic oligonucleotide
ctgcagcctccaactcctgg

SEQ ID NO: 12323 - DNA, 20 bp, Artificial Sequence
  Description of Artificial Sequence: Synthetic oligonucleotide
tgcagcctccaactcctggg

SEQ ID NO: 12324 - DNA, 20 bp, Artificial Sequence
  Description of Artificial Sequence: Synthetic oligonucleotide
gcagcctccaactcctgggg

SEQ ID NO: 12325 - DNA, 20 bp, Artificial Sequence
  Description of Artificial Sequence: Synthetic oligonucleotide
cagcctccaactcctggggt

SEQ ID NO: 12326 - DNA, 20 bp, Artificial Sequence
  Description of Artificial Sequence: Synthetic oligonucleotide
agcctccaactcctggggtc

SEQ ID NO: 12327 - DNA, 20 bp, Artificial Sequence
  Description of Artificial Sequence: Synthetic oligonucleotide
gcctccaactcctggggtca

SEQ ID NO: 12328 - DNA, 20 bp, Artificial Sequence
  Description of Artificial Sequence: Synthetic oligonucleotide
cctccaactcctggggtcag

SEQ ID NO: 12329 - DNA, 20 bp, Artificial Sequence
  Description of Artificial Sequence: Synthetic oligonucleotide
ctccaactcctggggtcagg

SEQ ID NO: 12330 - DNA, 20 bp, Artificial Sequence
  Description of Artificial Sequence: Synthetic oligonucleotide
tccaactcctggggtcaggc

SEQ ID NO: 12331 - DNA, 20 bp, Artificial Sequence
  Description of Artificial Sequence: Synthetic oligonucleotide
ccaactcctggggtcaggcg

SEQ ID NO: 12332 - DNA, 20 bp, Artificial Sequence
  Description of Artificial Sequence: Synthetic oligonucleotide
caactcctggggtcaggcga

SEQ ID NO: 12333 - DNA, 20 bp, Artificial Sequence
  Description of Artificial Sequence: Synthetic oligonucleotide
aactcctggggtcaggcgat

SEQ ID NO: 12334 - DNA, 20 bp, Artificial Sequence
  Description of Artificial Sequence: Synthetic oligonucleotide
actcctggggtcaggcgatc

SEQ ID NO: 12335 - DNA, 20 bp, Artificial Sequence
  Description of Artificial Sequence: Synthetic oligonucleotide
ctcctggggtcaggcgatcc

SEQ ID NO: 12336 - DNA, 20 bp, Artificial Sequence
  Description of Artificial Sequence: Synthetic oligonucleotide
tcctggggtcaggcgatcct

SEQ ID NO: 12337 - DNA, 20 bp, Artificial Sequence
  Description of Artificial Sequence: Synthetic oligonucleotide
cctggggtcaggcgatcctc

SEQ ID NO: 12338 - DNA, 20 bp, Artificial Sequence
  Description of Artificial Sequence: Synthetic oligonucleotide
ctggggtcaggcgatcctcc

SEQ ID NO: 12339 - DNA, 20 bp, Artificial Sequence
  Description of Artificial Sequence: Synthetic oligonucleotide
tggggtcaggcgatcctcct

SEQ ID NO: 12340 - DNA, 20 bp, Artificial Sequence
  Description of Artificial Sequence: Synthetic oligonucleotide
ggggtcaggcgatcctcctg

SEQ ID NO: 12341 - DNA, 20 bp, Artificial Sequence
  Description of Artificial Sequence: Synthetic oligonucleotide
gggtcaggcgatcctcctgt

SEQ ID NO: 12342 - DNA, 20 bp, Artificial Sequence
  Description of Artificial Sequence: Synthetic oligonucleotide
ggtcaggcgatcctcctgtt

SEQ ID NO: 12343 - DNA, 20 bp, Artificial Sequence
  Description of Artificial Sequence: Synthetic oligonucleotide
gtcaggcgatcctcctgttt

SEQ ID NO: 12344 - DNA, 20 bp, Artificial Sequence
  Description of Artificial Sequence: Synthetic oligonucleotide
tcaggcgatcctcctgtttt

SEQ ID NO: 12345 - DNA, 20 bp, Artificial Sequence
  Description of Artificial Sequence: Synthetic oligonucleotide
caggcgatcctcctgttttc

SEQ ID NO: 12346 - DNA, 20 bp, Artificial Sequence
  Description of Artificial Sequence: Synthetic oligonucleotide
aggcgatcctcctgttttca

SEQ ID NO: 12347 - DNA, 20 bp, Artificial Sequence
  Description of Artificial Sequence: Synthetic oligonucleotide
ggcgatcctcctgttttcag

SEQ ID NO: 12348 - DNA, 20 bp, Artificial Sequence
  Description of Artificial Sequence: Synthetic oligonucleotide
gcgatcctcctgttttcagc

SEQ ID NO: 12349 - DNA, 20 bp, Artificial Sequence
  Description of Artificial Sequence: Synthetic oligonucleotide
cgatcctcctgttttcagcc

SEQ ID NO: 12350 - DNA, 20 bp, Artificial Sequence
  Description of Artificial Sequence: Synthetic oligonucleotide
gatcctcctgttttcagcct

SEQ ID NO: 12351 - DNA, 20 bp, Artificial Sequence
  Description of Artificial Sequence: Synthetic oligonucleotide
atcctcctgttttcagcctc

SEQ ID NO: 12352 - DNA, 20 bp, Artificial Sequence
  Description of Artificial Sequence: Synthetic oligonucleotide
tcctcctgttttcagcctcc

SEQ ID NO: 12353 - DNA, 20 bp, Artificial Sequence
  Description of Artificial Sequence: Synthetic oligonucleotide
cctcctgttttcagcctcct

SEQ ID NO: 12354 - DNA, 20 bp, Artificial Sequence
  Description of Artificial Sequence: Synthetic oligonucleotide
ctcctgttttcagcctcctg

SEQ ID NO: 12355 - DNA, 20 bp, Artificial Sequence
  Description of Artificial Sequence: Synthetic oligonucleotide
tcctgttttcagcctcctgt

SEQ ID NO: 12356 - DNA, 20 bp, Artificial Sequence
  Description of Artificial Sequence: Synthetic oligonucleotide
cctgttttcagcctcctgtg

SEQ ID NO: 12357 - DNA, 20 bp, Artificial Sequence
  Description of Artificial Sequence: Synthetic oligonucleotide
ctgttttcagcctcctgtgt

SEQ ID NO: 12358 - DNA, 20 bp, Artificial Sequence
  Description of Artificial Sequence: Synthetic oligonucleotide
tgttttcagcctcctgtgta

SEQ ID NO: 12359 - DNA, 20 bp, Artificial Sequence
  Description of Artificial Sequence: Synthetic oligonucleotide
gttttcagcctcctgtgtag

SEQ ID NO: 12360 - DNA, 20 bp, Artificial Sequence
  Description of Artificial Sequence: Synthetic oligonucleotide
ttttcagcctcctgtgtagc

SEQ ID NO: 12361 - DNA, 20 bp, Artificial Sequence
  Description of Artificial Sequence: Synthetic oligonucleotide
tttcagcctcctgtgtagct

SEQ ID NO: 12362 - DNA, 20 bp, Artificial Sequence
  Description of Artificial Sequence: Synthetic oligonucleotide
ttcagcctcctgtgtagctg

SEQ ID NO: 12363 - DNA, 20 bp, Artificial Sequence
  Description of Artificial Sequence: Synthetic oligonucleotide
tcagcctcctgtgtagctgg

SEQ ID NO: 12364 - DNA, 20 bp, Artificial Sequence
  Description of Artificial Sequence: Synthetic oligonucleotide
cagcctcctgtgtagctggg

SEQ ID NO: 12365 - DNA, 20 bp, Artificial Sequence
  Description of Artificial Sequence: Synthetic oligonucleotide
agcctcctgtgtagctggga

SEQ ID NO: 12366 - DNA, 20 bp, Artificial Sequence
  Description of Artificial Sequence: Synthetic oligonucleotide
gcctcctgtgtagctgggac

SEQ ID NO: 12367 - DNA, 20 bp, Artificial Sequence
  Description of Artificial Sequence: Synthetic oligonucleotide
cctcctgtgtagctgggact

SEQ ID NO: 12368 - DNA, 20 bp, Artificial Sequence
  Description of Artificial Sequence: Synthetic oligonucleotide
ctcctgtgtagctgggacta

SEQ ID NO: 12369 - DNA, 20 bp, Artificial Sequence
  Description of Artificial Sequence: Synthetic oligonucleotide
tcctgtgtagctgggactac

SEQ ID NO: 12370 - DNA, 20 bp, Artificial Sequence
  Description of Artificial Sequence: Synthetic oligonucleotide
cctgtgtagctgggactaca

SEQ ID NO: 12371 - DNA, 20 bp, Artificial Sequence
  Description of Artificial Sequence: Synthetic oligonucleotide
ctgtgtagctgggactacag

SEQ ID NO: 12372 - DNA, 20 bp, Artificial Sequence
  Description of Artificial Sequence: Synthetic oligonucleotide
tgtgtagctgggactacagt

SEQ ID NO: 12373 - DNA, 20 bp, Artificial Sequence
  Description of Artificial Sequence: Synthetic oligonucleotide
gtgtagctgggactacagtc

SEQ ID NO: 12374 - DNA, 20 bp, Artificial Sequence
  Description of Artificial Sequence: Synthetic oligonucleotide
tgtagctgggactacagtca

SEQ ID NO: 12375 - DNA, 20 bp, Artificial Sequence
  Description of Artificial Sequence: Synthetic oligonucleotide
gtagctgggactacagtcat

SEQ ID NO: 12376 - DNA, 20 bp, Artificial Sequence
  Description of Artificial Sequence: Synthetic oligonucleotide
tagctgggactacagtcatg

SEQ ID NO: 12377 - DNA, 20 bp, Artificial Sequence
  Description of Artificial Sequence: Synthetic oligonucleotide
agctgggactacagtcatgc

SEQ ID NO: 12378 - DNA, 20 bp, Artificial Sequence
  Description of Artificial Sequence: Synthetic oligonucleotide
gctgggactacagtcatgca

SEQ ID NO: 12379 - DNA, 20 bp, Artificial Sequence
  Description of Artificial Sequence: Synthetic oligonucleotide
ctgggactacagtcatgcag

SEQ ID NO: 12380 - DNA, 20 bp, Artificial Sequence
  Description of Artificial Sequence: Synthetic oligonucleotide
tgggactacagtcatgcagc

SEQ ID NO: 12381 - DNA, 20 bp, Artificial Sequence
  Description of Artificial Sequence: Synthetic oligonucleotide
gggactacagtcatgcagct

SEQ ID NO: 12382 - DNA, 20 bp, Artificial Sequence
  Description of Artificial Sequence: Synthetic oligonucleotide
ggactacagtcatgcagctc

SEQ ID NO: 12383 - DNA, 20 bp, Artificial Sequence
  Description of Artificial Sequence: Synthetic oligonucleotide
gactacagtcatgcagctct

SEQ ID NO: 12384 - DNA, 20 bp, Artificial Sequence
  Description of Artificial Sequence: Synthetic oligonucleotide
actacagtcatgcagctcta

SEQ ID NO: 12385 - DNA, 20 bp, Artificial Sequence
  Description of Artificial Sequence: Synthetic oligonucleotide
ctacagtcatgcagctctat

SEQ ID NO: 12386 - DNA, 20 bp, Artificial Sequence
  Description of Artificial Sequence: Synthetic oligonucleotide
tacagtcatgcagctctatg

SEQ ID NO: 12387 - DNA, 20 bp, Artificial Sequence
  Description of Artificial Sequence: Synthetic oligonucleotide
acagtcatgcagctctatgc

SEQ ID NO: 12388 - DNA, 20 bp, Artificial Sequence
  Description of Artificial Sequence: Synthetic oligonucleotide
cagtcatgcagctctatgcc

SEQ ID NO: 12389 - DNA, 20 bp, Artificial Sequence
  Description of Artificial Sequence: Synthetic oligonucleotide
agtcatgcagctctatgcct

SEQ ID NO: 12390 - DNA, 20 bp, Artificial Sequence
  Description of Artificial Sequence: Synthetic oligonucleotide
gtcatgcagctctatgcctg

SEQ ID NO: 12391 - DNA, 20 bp, Artificial Sequence
  Description of Artificial Sequence: Synthetic oligonucleotide
tcatgcagctctatgcctgg

SEQ ID NO: 12392 - DNA, 20 bp, Artificial Sequence
  Description of Artificial Sequence: Synthetic oligonucleotide
catgcagctctatgcctggc

SEQ ID NO: 12393 - DNA, 20 bp, Artificial Sequence
  Description of Artificial Sequence: Synthetic oligonucleotide
atgcagctctatgcctggct

SEQ ID NO: 12394 - DNA, 20 bp, Artificial Sequence
  Description of Artificial Sequence: Synthetic oligonucleotide
tgcagctctatgcctggctt

SEQ ID NO: 12395 - DNA, 20 bp, Artificial Sequence
  Description of Artificial Sequence: Synthetic oligonucleotide
gcagctctatgcctggctta

SEQ ID NO: 12396 - DNA, 20 bp, Artificial Sequence
  Description of Artificial Sequence: Synthetic oligonucleotide
cagctctatgcctggcttat

SEQ ID NO: 12397 - DNA, 20 bp, Artificial Sequence
  Description of Artificial Sequence: Synthetic oligonucleotide
agctctatgcctggcttatt

SEQ ID NO: 12398 - DNA, 20 bp, Artificial Sequence
  Description of Artificial Sequence: Synthetic oligonucleotide
gctctatgcctggcttattt

SEQ ID NO: 12399 - DNA, 20 bp, Artificial Sequence
  Description of Artificial Sequence: Synthetic oligonucleotide
ctctatgcctggcttatttt

SEQ ID NO: 12400 - DNA, 20 bp, Artificial Sequence
  Description of Artificial Sequence: Synthetic oligonucleotide
tctatgcctggcttattttt

SEQ ID NO: 12401 - DNA, 20 bp, Artificial Sequence
  Description of Artificial Sequence: Synthetic oligonucleotide
ctatgcctggcttatttttt

SEQ ID NO: 12402 - DNA, 20 bp, Artificial Sequence
  Description of Artificial Sequence: Synthetic oligonucleotide
tatgcctggcttatttttta

SEQ ID NO: 12403 - DNA, 20 bp, Artificial Sequence
  Description of Artificial Sequence: Synthetic oligonucleotide
atgcctggcttattttttat

SEQ ID NO: 12404 - DNA, 20 bp, Artificial Sequence
  Description of Artificial Sequence: Synthetic oligonucleotide
tgcctggcttattttttatt

SEQ ID NO: 12405 - DNA, 20 bp, Artificial Sequence
  Description of Artificial Sequence: Synthetic oligonucleotide
gcctggcttattttttattt

SEQ ID NO: 12406 - DNA, 20 bp, Artificial Sequence
  Description of Artificial Sequence: Synthetic oligonucleotide
cctggcttattttttatttt

SEQ ID NO: 12407 - DNA, 20 bp, Artificial Sequence
  Description of Artificial Sequence: Synthetic oligonucleotide
ctggcttattttttattttt

SEQ ID NO: 12408 - DNA, 20 bp, Artificial Sequence
  Description of Artificial Sequence: Synthetic oligonucleotide
tggcttattttttatttttt

SEQ ID NO: 12409 - DNA, 20 bp, Artificial Sequence
  Description of Artificial Sequence: Synthetic oligonucleotide
ggcttattttttattttttc

SEQ ID NO: 12410 - DNA, 20 bp, Artificial Sequence
  Description of Artificial Sequence: Synthetic oligonucleotide
gcttattttttattttttca

SEQ ID NO: 12411 - DNA, 20 bp, Artificial Sequence
  Description of Artificial Sequence: Synthetic oligonucleotide
cttattttttattttttcag

SEQ ID NO: 12412 - DNA, 20 bp, Artificial Sequence
  Description of Artificial Sequence: Synthetic oligonucleotide
ttattttttattttttcaga

SEQ ID NO: 12413 - DNA, 20 bp, Artificial Sequence
  Description of Artificial Sequence: Synthetic oligonucleotide
tattttttattttttcagac

SEQ ID NO: 12414 - DNA, 20 bp, Artificial Sequence
  Description of Artificial Sequence: Synthetic oligonucleotide
attttttattttttcagaca

SEQ ID NO: 12415 - DNA, 20 bp, Artificial Sequence
  Description of Artificial Sequence: Synthetic oligonucleotide
ttttttattttttcagacag

SEQ ID NO: 12416 - DNA, 20 bp, Artificial Sequence
  Description of Artificial Sequence: Synthetic oligonucleotide
tttttattttttcagacaga

SEQ ID NO: 12417 - DNA, 20 bp, Artificial Sequence
  Description of Artificial Sequence: Synthetic oligonucleotide
ttttattttttcagacagag

SEQ ID NO: 12418 - DNA, 20 bp, Artificial Sequence
  Description of Artificial Sequence: Synthetic oligonucleotide
tttattttttcagacagagt

SEQ ID NO: 12419 - DNA, 20 bp, Artificial Sequence
  Description of Artificial Sequence: Synthetic oligonucleotide
ttattttttcagacagagtc

SEQ ID NO: 12420 - DNA, 20 bp, Artificial Sequence
  Description of Artificial Sequence: Synthetic oligonucleotide
tattttttcagacagagtct

SEQ ID NO: 12421 - DNA, 20 bp, Artificial Sequence
  Description of Artificial Sequence: Synthetic oligonucleotide
attttttcagacagagtctc

SEQ ID NO: 12422 - DNA, 20 bp, Artificial Sequence
  Description of Artificial Sequence: Synthetic oligonucleotide
ttttttcagacagagtctcg

SEQ ID NO: 12423 - DNA, 20 bp, Artificial Sequence
  Description of Artificial Sequence: Synthetic oligonucleotide
tttttcagacagagtctcgc

SEQ ID NO: 12424 - DNA, 20 bp, Artificial Sequence
  Description of Artificial Sequence: Synthetic oligonucleotide
ttttcagacagagtctcgct

SEQ ID NO: 12425 - DNA, 20 bp, Artificial Sequence
  Description of Artificial Sequence: Synthetic oligonucleotide
tttcagacagagtctcgctc

SEQ ID NO: 12426 - DNA, 20 bp, Artificial Sequence
  Description of Artificial Sequence: Synthetic oligonucleotide
ttcagacagagtctcgctct

SEQ ID NO: 12427 - DNA, 20 bp, Artificial Sequence
  Description of Artificial Sequence: Synthetic oligonucleotide
tcagacagagtctcgctctg

SEQ ID NO: 12428 - DNA, 20 bp, Artificial Sequence
  Description of Artificial Sequence: Synthetic oligonucleotide
cagacagagtctcgctctgt

SEQ ID NO: 12429 - DNA, 20 bp, Artificial Sequence
  Description of Artificial Sequence: Synthetic oligonucleotide
agacagagtctcgctctgtc

SEQ ID NO: 12430 - DNA, 20 bp, Artificial Sequence
  Description of Artificial Sequence: Synthetic oligonucleotide
gacagagtctcgctctgtca

SEQ ID NO: 12431 - DNA, 20 bp, Artificial Sequence
  Description of Artificial Sequence: Synthetic oligonucleotide
acagagtctcgctctgtcac

SEQ ID NO: 12432 - DNA, 20 bp, Artificial Sequence
  Description of Artificial Sequence: Synthetic oligonucleotide
cagagtctcgctctgtcacc

SEQ ID NO: 12433 - DNA, 20 bp, Artificial Sequence
  Description of Artificial Sequence: Synthetic oligonucleotide
agagtctcgctctgtcaccc

SEQ ID NO: 12434 - DNA, 20 bp, Artificial Sequence
  Description of Artificial Sequence: Synthetic oligonucleotide
gagtctcgctctgtcaccca

SEQ ID NO: 12435 - DNA, 20 bp, Artificial Sequence
  Description of Artificial Sequence: Synthetic oligonucleotide
agtctcgctctgtcacccag

SEQ ID NO: 12436 - DNA, 20 bp, Artificial Sequence
  Description of Artificial Sequence: Synthetic oligonucleotide
gtctcgctctgtcacccagg

SEQ ID NO: 12437 - DNA, 20 bp, Artificial Sequence
  Description of Artificial Sequence: Synthetic oligonucleotide
tctcgctctgtcacccaggt

SEQ ID NO: 12438 - DNA, 20 bp, Artificial Sequence
  Description of Artificial Sequence: Synthetic oligonucleotide
ctcgctctgtcacccaggtt

SEQ ID NO: 12439 - DNA, 20 bp, Artificial Sequence
  Description of Artificial Sequence: Synthetic oligonucleotide
tcgctctgtcacccaggttg

SEQ ID NO: 12440 - DNA, 20 bp, Artificial Sequence
  Description of Artificial Sequence: Synthetic oligonucleotide
cgctctgtcacccaggttgg

SEQ ID NO: 12441 - DNA, 20 bp, Artificial Sequence
  Description of Artificial Sequence: Synthetic oligonucleotide
gctctgtcacccaggttgga

SEQ ID NO: 12442 - DNA, 20 bp, Artificial Sequence
  Description of Artificial Sequence: Synthetic oligonucleotide
ctctgtcacccaggttggag

SEQ ID NO: 12443 - DNA, 20 bp, Artificial Sequence
  Description of Artificial Sequence: Synthetic oligonucleotide
tctgtcacccaggttggagt

SEQ ID NO: 12444 - DNA, 20 bp, Artificial Sequence
  Description of Artificial Sequence: Synthetic oligonucleotide
ctgtcacccaggttggagtg

SEQ ID NO: 12445 - DNA, 20 bp, Artificial Sequence
  Description of Artificial Sequence: Synthetic oligonucleotide
tgtcacccaggttggagtgc

SEQ ID NO: 12446 - DNA, 20 bp, Artificial Sequence
  Description of Artificial Sequence: Synthetic oligonucleotide
gtcacccaggttggagtgca

SEQ ID NO: 12447 - DNA, 20 bp, Artificial Sequence
  Description of Artificial Sequence: Synthetic oligonucleotide
tcacccaggttggagtgcag

SEQ ID NO: 12448 - DNA, 20 bp, Artificial Sequence
  Description of Artificial Sequence: Synthetic oligonucleotide
cacccaggttggagtgcagt

SEQ ID NO: 12449 - DNA, 20 bp, Artificial Sequence
  Description of Artificial Sequence: Synthetic oligonucleotide
acccaggttggagtgcagtg

SEQ ID NO: 12450 - DNA, 20 bp, Artificial Sequence
  Description of Artificial Sequence: Synthetic oligonucleotide
cccaggttggagtgcagtgg

SEQ ID NO: 12451 - DNA, 20 bp, Artificial Sequence
  Description of Artificial Sequence: Synthetic oligonucleotide
ccaggttggagtgcagtggc

SEQ ID NO: 12452 - DNA, 20 bp, Artificial Sequence
  Description of Artificial Sequence: Synthetic oligonucleotide
caggttggagtgcagtggcg

SEQ ID NO: 12453 - DNA, 20 bp, Artificial Sequence
  Description of Artificial Sequence: Synthetic oligonucleotide
aggttggagtgcagtggcgc

SEQ ID NO: 12454 - DNA, 20 bp, Artificial Sequence
  Description of Artificial Sequence: Synthetic oligonucleotide
ggttggagtgcagtggcgca

SEQ ID NO: 12455 - DNA, 20 bp, Artificial Sequence
  Description of Artificial Sequence: Synthetic oligonucleotide
gttggagtgcagtggcgcaa

SEQ ID NO: 12456 - DNA, 20 bp, Artificial Sequence
  Description of Artificial Sequence: Synthetic oligonucleotide
ttggagtgcagtggcgcaat

SEQ ID NO: 12457 - DNA, 20 bp, Artificial Sequence
  Description of Artificial Sequence: Synthetic oligonucleotide
tggagtgcagtggcgcaatc

SEQ ID NO: 12458 - DNA, 20 bp, Artificial Sequence
  Description of Artificial Sequence: Synthetic oligonucleotide
ggagtgcagtggcgcaatct

SEQ ID NO: 12459 - DNA, 20 bp, Artificial Sequence
  Description of Artificial Sequence: Synthetic oligonucleotide
gagtgcagtggcgcaatctt

SEQ ID NO: 12460 - DNA, 20 bp, Artificial Sequence
  Description of Artificial Sequence: Synthetic oligonucleotide
agtgcagtggcgcaatcttg

SEQ ID NO: 12461 - DNA, 20 bp, Artificial Sequence
  Description of Artificial Sequence: Synthetic oligonucleotide
gtgcagtggcgcaatcttgg

SEQ ID NO: 12462 - DNA, 20 bp, Artificial Sequence
  Description of Artificial Sequence: Synthetic oligonucleotide
tgcagtggcgcaatcttggc

SEQ ID NO: 12463 - DNA, 20 bp, Artificial Sequence
  Description of Artificial Sequence: Synthetic oligonucleotide
gcagtggcgcaatcttggct

SEQ ID NO: 12464 - DNA, 20 bp, Artificial Sequence
  Description of Artificial Sequence: Synthetic oligonucleotide
cagtggcgcaatcttggctc

SEQ ID NO: 12465 - DNA, 20 bp, Artificial Sequence
  Description of Artificial Sequence: Synthetic oligonucleotide
agtggcgcaatcttggctca

SEQ ID NO: 12466 - DNA, 20 bp, Artificial Sequence
  Description of Artificial Sequence: Synthetic oligonucleotide
gtggcgcaatcttggctcac

SEQ ID NO: 12467 - DNA, 20 bp, Artificial Sequence
  Description of Artificial Sequence: Synthetic oligonucleotide
tggcgcaatcttggctcact

SEQ ID NO: 12468 - DNA, 20 bp, Artificial Sequence
  Description of Artificial Sequence: Synthetic oligonucleotide
ggcgcaatcttggctcactg

SEQ ID NO: 12469 - DNA, 20 bp, Artificial Sequence
  Description of Artificial Sequence: Synthetic oligonucleotide
gcgcaatcttggctcactgc

SEQ ID NO: 12470 - DNA, 20 bp, Artificial Sequence
  Description of Artificial Sequence: Synthetic oligonucleotide
cgcaatcttggctcactgca

SEQ ID NO: 12471 - DNA, 20 bp, Artificial Sequence
  Description of Artificial Sequence: Synthetic oligonucleotide
gcaatcttggctcactgcaa

SEQ ID NO: 12472 - DNA, 20 bp, Artificial Sequence
  Description of Artificial Sequence: Synthetic oligonucleotide
caatcttggctcactgcaac

SEQ ID NO: 12473 - DNA, 20 bp, Artificial Sequence
  Description of Artificial Sequence: Synthetic oligonucleotide
aatcttggctcactgcaacc

SEQ ID NO: 12474 - DNA, 20 bp, Artificial Sequence
  Description of Artificial Sequence: Synthetic oligonucleotide
atcttggctcactgcaacct

SEQ ID NO: 12475 - DNA, 20 bp, Artificial Sequence
  Description of Artificial Sequence: Synthetic oligonucleotide
tcttggctcactgcaacctc

SEQ ID NO: 12476 - DNA, 20 bp, Artificial Sequence
  Description of Artificial Sequence: Synthetic oligonucleotide
cttggctcactgcaacctct

SEQ ID NO: 12477 - DNA, 20 bp, Artificial Sequence
  Description of Artificial Sequence: Synthetic oligonucleotide
ttggctcactgcaacctctg

SEQ ID NO: 12478 - DNA, 20 bp, Artificial Sequence
  Description of Artificial Sequence: Synthetic oligonucleotide
tggctcactgcaacctctgc

SEQ ID NO: 12479 - DNA, 20 bp, Artificial Sequence
  Description of Artificial Sequence: Synthetic oligonucleotide
ggctcactgcaacctctgcc

SEQ ID NO: 12480 - DNA, 20 bp, Artificial Sequence
  Description of Artificial Sequence: Synthetic oligonucleotide
gctcactgcaacctctgcct

SEQ ID NO: 12481 - DNA, 20 bp, Artificial Sequence
  Description of Artificial Sequence: Synthetic oligonucleotide
ctcactgcaacctctgcctc

SEQ ID NO: 12482 - DNA, 20 bp, Artificial Sequence
  Description of Artificial Sequence: Synthetic oligonucleotide
tcactgcaacctctgcctcc

SEQ ID NO: 12483 - DNA, 20 bp, Artificial Sequence
  Description of Artificial Sequence: Synthetic oligonucleotide
cactgcaacctctgcctccc

SEQ ID NO: 12484 - DNA, 20 bp, Artificial Sequence
  Description of Artificial Sequence: Synthetic oligonucleotide
actgcaacctctgcctccca

SEQ ID NO: 12485 - DNA, 20 bp, Artificial Sequence
  Description of Artificial Sequence: Synthetic oligonucleotide
ctgcaacctctgcctcccag

SEQ ID NO: 12486 - DNA, 20 bp, Artificial Sequence
  Description of Artificial Sequence: Synthetic oligonucleotide
tgcaacctctgcctcccaga

SEQ ID NO: 12487 - DNA, 20 bp, Artificial Sequence
  Description of Artificial Sequence: Synthetic oligonucleotide
gcaacctctgcctcccagac

SEQ ID NO: 12488 - DNA, 20 bp, Artificial Sequence
  Description of Artificial Sequence: Synthetic oligonucleotide
caacctctgcctcccagact

SEQ ID NO: 12489 - DNA, 20 bp, Artificial Sequence
  Description of Artificial Sequence: Synthetic oligonucleotide
aacctctgcctcccagactc

SEQ ID NO: 12490 - DNA, 20 bp, Artificial Sequence
  Description of Artificial Sequence: Synthetic oligonucleotide
acctctgcctcccagactca

SEQ ID NO: 12491 - DNA, 20 bp, Artificial Sequence
  Description of Artificial Sequence: Synthetic oligonucleotide
cctctgcctcccagactcaa

SEQ ID NO: 12492 - DNA, 20 bp, Artificial Sequence
  Description of Artificial Sequence: Synthetic oligonucleotide
ctctgcctcccagactcaag

SEQ ID NO: 12493 - DNA, 20 bp, Artificial Sequence
  Description of Artificial Sequence: Synthetic oligonucleotide
tctgcctcccagactcaagt

SEQ ID NO: 12494 - DNA, 20 bp, Artificial Sequence
  Description of Artificial Sequence: Synthetic oligonucleotide
ctgcctcccagactcaagtg

SEQ ID NO: 12495 - DNA, 20 bp, Artificial Sequence
  Description of Artificial Sequence: Synthetic oligonucleotide
tgcctcccagactcaagtga

SEQ ID NO: 12496 - DNA, 20 bp, Artificial Sequence
  Description of Artificial Sequence: Synthetic oligonucleotide
gcctcccagactcaagtgat

SEQ ID NO: 12497 - DNA, 20 bp, Artificial Sequence
  Description of Artificial Sequence: Synthetic oligonucleotide
cctcccagactcaagtgatt

SEQ ID NO: 12498 - DNA, 20 bp, Artificial Sequence
  Description of Artificial Sequence: Synthetic oligonucleotide
ctcccagactcaagtgattc

SEQ ID NO: 12499 - DNA, 20 bp, Artificial Sequence
  Description of Artificial Sequence: Synthetic oligonucleotide
tcccagactcaagtgattct

SEQ ID NO: 12500 - DNA, 20 bp, Artificial Sequence
  Description of Artificial Sequence: Synthetic oligonucleotide
cccagactcaagtgattctt

SEQ ID NO: 12501 - DNA, 20 bp, Artificial Sequence
  Description of Artificial Sequence: Synthetic oligonucleotide
ccagactcaagtgattcttg

SEQ ID NO: 12502 - DNA, 20 bp, Artificial Sequence
  Description of Artificial Sequence: Synthetic oligonucleotide
cagactcaagtgattcttgt

SEQ ID NO: 12503 - DNA, 20 bp, Artificial Sequence
  Description of Artificial Sequence: Synthetic oligonucleotide
agactcaagtgattcttgtg

SEQ ID NO: 12504 - DNA, 20 bp, Artificial Sequence
  Description of Artificial Sequence: Synthetic oligonucleotide
gactcaagtgattcttgtgt

SEQ ID NO: 12505 - DNA, 20 bp, Artificial Sequence
  Description of Artificial Sequence: Synthetic oligonucleotide
actcaagtgattcttgtgtc

SEQ ID NO: 12506 - DNA, 20 bp, Artificial Sequence
  Description of Artificial Sequence: Synthetic oligonucleotide
ctcaagtgattcttgtgtct

SEQ ID NO: 12507 - DNA, 20 bp, Artificial Sequence
  Description of Artificial Sequence: Synthetic oligonucleotide
tcaagtgattcttgtgtctc

SEQ ID NO: 12508 - DNA, 20 bp, Artificial Sequence
  Description of Artificial Sequence: Synthetic oligonucleotide
caagtgattcttgtgtctca

SEQ ID NO: 12509 - DNA, 20 bp, Artificial Sequence
  Description of Artificial Sequence: Synthetic oligonucleotide
aagtgattcttgtgtctcag

SEQ ID NO: 12510 - DNA, 20 bp, Artificial Sequence
  Description of Artificial Sequence: Synthetic oligonucleotide
agtgattcttgtgtctcagc

SEQ ID NO: 12511 - DNA, 20 bp, Artificial Sequence
  Description of Artificial Sequence: Synthetic oligonucleotide
gtgattcttgtgtctcagcc

SEQ ID NO: 12512 - DNA, 20 bp, Artificial Sequence
  Description of Artificial Sequence: Synthetic oligonucleotide
tgattcttgtgtctcagcct

SEQ ID NO: 12513 - DNA, 20 bp, Artificial Sequence
  Description of Artificial Sequence: Synthetic oligonucleotide
gattcttgtgtctcagcctc

SEQ ID NO: 12514 - DNA, 20 bp, Artificial Sequence
  Description of Artificial Sequence: Synthetic oligonucleotide
attcttgtgtctcagcctcc

SEQ ID NO: 12515 - DNA, 20 bp, Artificial Sequence
  Description of Artificial Sequence: Synthetic oligonucleotide
ttcttgtgtctcagcctccc

SEQ ID NO: 12516 - DNA, 20 bp, Artificial Sequence
  Description of Artificial Sequence: Synthetic oligonucleotide
tcttgtgtctcagcctccca

SEQ ID NO: 12517 - DNA, 20 bp, Artificial Sequence
  Description of Artificial Sequence: Synthetic oligonucleotide
cttgtgtctcagcctcccaa

SEQ ID NO: 12518 - DNA, 20 bp, Artificial Sequence
  Description of Artificial Sequence: Synthetic oligonucleotide
ttgtgtctcagcctcccaag

SEQ ID NO: 12519 - DNA, 20 bp, Artificial Sequence
  Description of Artificial Sequence: Synthetic oligonucleotide
tgtgtctcagcctcccaagt

SEQ ID NO: 12520 - DNA, 20 bp, Artificial Sequence
  Description of Artificial Sequence: Synthetic oligonucleotide
gtgtctcagcctcccaagta

SEQ ID NO: 12521 - DNA, 20 bp, Artificial Sequence
  Description of Artificial Sequence: Synthetic oligonucleotide
tgtctcagcctcccaagtag

SEQ ID NO: 12522 - DNA, 20 bp, Artificial Sequence
  Description of Artificial Sequence: Synthetic oligonucleotide
gtctcagcctcccaagtagc

SEQ ID NO: 12523 - DNA, 20 bp, Artificial Sequence
  Description of Artificial Sequence: Synthetic oligonucleotide
tctcagcctcccaagtagct

SEQ ID NO: 12524 - DNA, 20 bp, Artificial Sequence
  Description of Artificial Sequence: Synthetic oligonucleotide
ctcagcctcccaagtagctg

SEQ ID NO: 12525 - DNA, 20 bp, Artificial Sequence
  Description of Artificial Sequence: Synthetic oligonucleotide
tcagcctcccaagtagctgc

SEQ ID NO: 12526 - DNA, 20 bp, Artificial Sequence
  Description of Artificial Sequence: Synthetic oligonucleotide
cagcctcccaagtagctgcc

SEQ ID NO: 12527 - DNA, 20 bp, Artificial Sequence
  Description of Artificial Sequence: Synthetic oligonucleotide
agcctcccaagtagctgcca

SEQ ID NO: 12528 - DNA, 20 bp, Artificial Sequence
  Description of Artificial Sequence: Synthetic oligonucleotide
gcctcccaagtagctgccac

SEQ ID NO: 12529 - DNA, 20 bp, Artificial Sequence
  Description of Artificial Sequence: Synthetic oligonucleotide
cctcccaagtagctgccacc

SEQ ID NO: 12530 - DNA, 20 bp, Artificial Sequence
  Description of Artificial Sequence: Synthetic oligonucleotide
ctcccaagtagctgccacca

SEQ ID NO: 12531 - DNA, 20 bp, Artificial Sequence
  Description of Artificial Sequence: Synthetic oligonucleotide
tcccaagtagctgccaccac

SEQ ID NO: 12532 - DNA, 20 bp, Artificial Sequence
  Description of Artificial Sequence: Synthetic oligonucleotide
cccaagtagctgccaccaca

SEQ ID NO: 12533 - DNA, 20 bp, Artificial Sequence
  Description of Artificial Sequence: Synthetic oligonucleotide
ccaagtagctgccaccacac

SEQ ID NO: 12534 - DNA, 20 bp, Artificial Sequence
  Description of Artificial Sequence: Synthetic oligonucleotide
caagtagctgccaccacacc

SEQ ID NO: 12535 - DNA, 20 bp, Artificial Sequence
  Description of Artificial Sequence: Synthetic oligonucleotide
aagtagctgccaccacacct

SEQ ID NO: 12536 - DNA, 20 bp, Artificial Sequence
  Description of Artificial Sequence: Synthetic oligonucleotide
agtagctgccaccacacctg

SEQ ID NO: 12537 - DNA, 20 bp, Artificial Sequence
  Description of Artificial Sequence: Synthetic oligonucleotide
gtagctgccaccacacctgg

SEQ ID NO: 12538 - DNA, 20 bp, Artificial Sequence
  Description of Artificial Sequence: Synthetic oligonucleotide
tagctgccaccacacctggc

SEQ ID NO: 12539 - DNA, 20 bp, Artificial Sequence
  Description of Artificial Sequence: Synthetic oligonucleotide
agctgccaccacacctggct

SEQ ID NO: 12540 - DNA, 20 bp, Artificial Sequence
  Description of Artificial Sequence: Synthetic oligonucleotide
gctgccaccacacctggcta

SEQ ID NO: 12541 - DNA, 20 bp, Artificial Sequence
  Description of Artificial Sequence: Synthetic oligonucleotide
ctgccaccacacctggctaa

SEQ ID NO: 12542 - DNA, 20 bp, Artificial Sequence
  Description of Artificial Sequence: Synthetic oligonucleotide
tgccaccacacctggctaat

SEQ ID NO: 12543 - DNA, 20 bp, Artificial Sequence
  Description of Artificial Sequence: Synthetic oligonucleotide
gccaccacacctggctaatt

SEQ ID NO: 12544 - DNA, 20 bp, Artificial Sequence
  Description of Artificial Sequence: Synthetic oligonucleotide
ccaccacacctggctaattt

SEQ ID NO: 12545 - DNA, 20 bp, Artificial Sequence
  Description of Artificial Sequence: Synthetic oligonucleotide
caccacacctggctaatttt

SEQ ID NO: 12546 - DNA, 20 bp, Artificial Sequence
  Description of Artificial Sequence: Synthetic oligonucleotide
accacacctggctaattttt

SEQ ID NO: 12547 - DNA, 20 bp, Artificial Sequence
  Description of Artificial Sequence: Synthetic oligonucleotide
ccacacctggctaatttttg

SEQ ID NO: 12548 - DNA, 20 bp, Artificial Sequence
  Description of Artificial Sequence: Synthetic oligonucleotide
cacacctggctaatttttgt

SEQ ID NO: 12549 - DNA, 20 bp, Artificial Sequence
  Description of Artificial Sequence: Synthetic oligonucleotide
acacctggctaatttttgta

SEQ ID NO: 12550 - DNA, 20 bp, Artificial Sequence
  Description of Artificial Sequence: Synthetic oligonucleotide
cacctggctaatttttgtat

SEQ ID NO: 12551 - DNA, 20 bp, Artificial Sequence
  Description of Artificial Sequence: Synthetic oligonucleotide
acctggctaatttttgtatt

SEQ ID NO: 12552 - DNA, 20 bp, Artificial Sequence
  Description of Artificial Sequence: Synthetic oligonucleotide
cctggctaatttttgtattt

SEQ ID NO: 12553 - DNA, 20 bp, Artificial Sequence
  Description of Artificial Sequence: Synthetic oligonucleotide
ctggctaatttttgtatttg

SEQ ID NO: 12554 - DNA, 20 bp, Artificial Sequence
  Description of Artificial Sequence: Synthetic oligonucleotide
tggctaatttttgtatttgt

SEQ ID NO: 12555 - DNA, 20 bp, Artificial Sequence
  Description of Artificial Sequence: Synthetic oligonucleotide
ggctaatttttgtatttgta

SEQ ID NO: 12556 - DNA, 20 bp, Artificial Sequence
  Description of Artificial Sequence: Synthetic oligonucleotide
gctaatttttgtatttgtat

SEQ ID NO: 12557 - DNA, 20 bp, Artificial Sequence
  Description of Artificial Sequence: Synthetic oligonucleotide
ctaatttttgtatttgtatt

SEQ ID NO: 12558 - DNA, 20 bp, Artificial Sequence
  Description of Artificial Sequence: Synthetic oligonucleotide
taatttttgtatttgtattt

SEQ ID NO: 12559 - DNA, 20 bp, Artificial Sequence
  Description of Artificial Sequence: Synthetic oligonucleotide
aatttttgtatttgtatttt

SEQ ID NO: 12560 - DNA, 20 bp, Artificial Sequence
  Description of Artificial Sequence: Synthetic oligonucleotide
atttttgtatttgtatttta

SEQ ID NO: 12561 - DNA, 20 bp, Artificial Sequence
  Description of Artificial Sequence: Synthetic oligonucleotide
tttttgtatttgtattttat

SEQ ID NO: 12562 - DNA, 20 bp, Artificial Sequence
  Description of Artificial Sequence: Synthetic oligonucleotide
ttttgtatttgtattttatt

SEQ ID NO: 12563 - DNA, 20 bp, Artificial Sequence
  Description of Artificial Sequence: Synthetic oligonucleotide
tttgtatttgtattttattt

SEQ ID NO: 12564 - DNA, 20 bp, Artificial Sequence
  Description of Artificial Sequence: Synthetic oligonucleotide
ttgtatttgtattttatttt

SEQ ID NO: 12565 - DNA, 20 bp, Artificial Sequence
  Description of Artificial Sequence: Synthetic oligonucleotide
tgtatttgtattttatttta

SEQ ID NO: 12566 - DNA, 20 bp, Artificial Sequence
  Description of Artificial Sequence: Synthetic oligonucleotide
gtatttgtattttattttat

SEQ ID NO: 12567 - DNA, 20 bp, Artificial Sequence
  Description of Artificial Sequence: Synthetic oligonucleotide
tatttgtattttattttatt

SEQ ID NO: 12568 - DNA, 20 bp, Artificial Sequence
  Description of Artificial Sequence: Synthetic oligonucleotide
atttgtattttattttattt

SEQ ID NO: 12569 - DNA, 20 bp, Artificial Sequence
  Description of Artificial Sequence: Synthetic oligonucleotide
tttgtattttattttattta

SEQ ID NO: 12570 - DNA, 20 bp, Artificial Sequence
  Description of Artificial Sequence: Synthetic oligonucleotide
ttgtattttattttatttat

SEQ ID NO: 12571 - DNA, 20 bp, Artificial Sequence
  Description of Artificial Sequence: Synthetic oligonucleotide
tgtattttattttatttatt

SEQ ID NO: 12572 - DNA, 20 bp, Artificial Sequence
  Description of Artificial Sequence: Synthetic oligonucleotide
gtattttattttatttatta

SEQ ID NO: 12573 - DNA, 20 bp, Artificial Sequence
  Description of Artificial Sequence: Synthetic oligonucleotide
tattttattttatttattat

SEQ ID NO: 12574 - DNA, 20 bp, Artificial Sequence
  Description of Artificial Sequence: Synthetic oligonucleotide
attttattttatttattatt

SEQ ID NO: 12575 - DNA, 20 bp, Artificial Sequence
  Description of Artificial Sequence: Synthetic oligonucleotide
ttttattttatttattatta

SEQ ID NO: 12576 - DNA, 20 bp, Artificial Sequence
  Description of Artificial Sequence: Synthetic oligonucleotide
tttattttatttattattat

SEQ ID NO: 12577 - DNA, 20 bp, Artificial Sequence
  Description of Artificial Sequence: Synthetic oligonucleotide
ttattttatttattattatt

SEQ ID NO: 12578 - DNA, 20 bp, Artificial Sequence
  Description of Artificial Sequence: Synthetic oligonucleotide
tattttatttattattatta

SEQ ID NO: 12579 - DNA, 20 bp, Artificial Sequence
  Description of Artificial Sequence: Synthetic oligonucleotide
attttatttattattattat

SEQ ID NO: 12580 - DNA, 20 bp, Artificial Sequence
  Description of Artificial Sequence: Synthetic oligonucleotide
ttttatttattattattatt

SEQ ID NO: 12581 - DNA, 20 bp, Artificial Sequence
  Description of Artificial Sequence: Synthetic oligonucleotide
tttatttattattattatta

SEQ ID NO: 12582 - DNA, 20 bp, Artificial Sequence
  Description of Artificial Sequence: Synthetic oligonucleotide
ttatttattattattattat

SEQ ID NO: 12583 - DNA, 20 bp, Artificial Sequence
  Description of Artificial Sequence: Synthetic oligonucleotide
tatttattattattattatt

SEQ ID NO: 12584 - DNA, 20 bp, Artificial Sequence
  Description of Artificial Sequence: Synthetic oligonucleotide
atttattattattattattt

SEQ ID NO: 12585 - DNA, 20 bp, Artificial Sequence
  Description of Artificial Sequence: Synthetic oligonucleotide
tttattattattattatttt

SEQ ID NO: 12586 - DNA, 20 bp, Artificial Sequence
  Description of Artificial Sequence: Synthetic oligonucleotide
ttattattattattattttg

SEQ ID NO: 12587 - DNA, 20 bp, Artificial Sequence
  Description of Artificial Sequence: Synthetic oligonucleotide
tattattattattattttga

SEQ ID NO: 12588 - DNA, 20 bp, Artificial Sequence
  Description of Artificial Sequence: Synthetic oligonucleotide
attattattattattttgag

SEQ ID NO: 12589 - DNA, 20 bp, Artificial Sequence
  Description of Artificial Sequence: Synthetic oligonucleotide
ttattattattattttgaga

SEQ ID NO: 12590 - DNA, 20 bp, Artificial Sequence
  Description of Artificial Sequence: Synthetic oligonucleotide
tattattattattttgagat

SEQ ID NO: 12591 - DNA, 20 bp, Artificial Sequence
  Description of Artificial Sequence: Synthetic oligonucleotide
attattattattttgagatg

SEQ ID NO: 12592 - DNA, 20 bp, Artificial Sequence
  Description of Artificial Sequence: Synthetic oligonucleotide
ttattattattttgagatgg

SEQ ID NO: 12593 - DNA, 20 bp, Artificial Sequence
  Description of Artificial Sequence: Synthetic oligonucleotide
tattattattttgagatgga

SEQ ID NO: 12594 - DNA, 20 bp, Artificial Sequence
  Description of Artificial Sequence: Synthetic oligonucleotide
attattattttgagatggag

SEQ ID NO: 12595 - DNA, 20 bp, Artificial Sequence
  Description of Artificial Sequence: Synthetic oligonucleotide
ttattattttgagatggagt

SEQ ID NO: 12596 - DNA, 20 bp, Artificial Sequence
  Description of Artificial Sequence: Synthetic oligonucleotide
tattattttgagatggagtc

SEQ ID NO: 12597 - DNA, 20 bp, Artificial Sequence
  Description of Artificial Sequence: Synthetic oligonucleotide
attattttgagatggagtcg

SEQ ID NO: 12598 - DNA, 20 bp, Artificial Sequence
  Description of Artificial Sequence: Synthetic oligonucleotide
ttattttgagatggagtcga

SEQ ID NO: 12599 - DNA, 20 bp, Artificial Sequence
  Description of Artificial Sequence: Synthetic oligonucleotide
tattttgagatggagtcgag

SEQ ID NO: 12600 - DNA, 20 bp, Artificial Sequence
  Description of Artificial Sequence: Synthetic oligonucleotide
attttgagatggagtcgagc

SEQ ID NO: 12601 - DNA, 20 bp, Artificial Sequence
  Description of Artificial Sequence: Synthetic oligonucleotide
ttttgagatggagtcgagct

SEQ ID NO: 12602 - DNA, 20 bp, Artificial Sequence
  Description of Artificial Sequence: Synthetic oligonucleotide
tttgagatggagtcgagctc

SEQ ID NO: 12603 - DNA, 20 bp, Artificial Sequence
  Description of Artificial Sequence: Synthetic oligonucleotide
ttgagatggagtcgagctct

SEQ ID NO: 12604 - DNA, 20 bp, Artificial Sequence
  Description of Artificial Sequence: Synthetic oligonucleotide
tgagatggagtcgagctctg

SEQ ID NO: 12605 - DNA, 20 bp, Artificial Sequence
  Description of Artificial Sequence: Synthetic oligonucleotide
gagatggagtcgagctctgt

SEQ ID NO: 12606 - DNA, 20 bp, Artificial Sequence
  Description of Artificial Sequence: Synthetic oligonucleotide
agatggagtcgagctctgtc

SEQ ID NO: 12607 - DNA, 20 bp, Artificial Sequence
  Description of Artificial Sequence: Synthetic oligonucleotide
gatggagtcgagctctgtcg

SEQ ID NO: 12608 - DNA, 20 bp, Artificial Sequence
  Description of Artificial Sequence: Synthetic oligonucleotide
atggagtcgagctctgtcgc

SEQ ID NO: 12609 - DNA, 20 bp, Artificial Sequence
  Description of Artificial Sequence: Synthetic oligonucleotide
tggagtcgagctctgtcgcc

SEQ ID NO: 12610 - DNA, 20 bp, Artificial Sequence
  Description of Artificial Sequence: Synthetic oligonucleotide
ggagtcgagctctgtcgccc

SEQ ID NO: 12611 - DNA, 20 bp, Artificial Sequence
  Description of Artificial Sequence: Synthetic oligonucleotide
gagtcgagctctgtcgccca

SEQ ID NO: 12612 - DNA, 20 bp, Artificial Sequence
  Description of Artificial Sequence: Synthetic oligonucleotide
agtcgagctctgtcgcccag

SEQ ID NO: 12613 - DNA, 20 bp, Artificial Sequence
  Description of Artificial Sequence: Synthetic oligonucleotide
gtcgagctctgtcgcccagg

SEQ ID NO: 12614 - DNA, 20 bp, Artificial Sequence
  Description of Artificial Sequence: Synthetic oligonucleotide
tcgagctctgtcgcccaggc

SEQ ID NO: 12615 - DNA, 20 bp, Artificial Sequence
  Description of Artificial Sequence: Synthetic oligonucleotide
cgagctctgtcgcccaggct

SEQ ID NO: 12616 - DNA, 20 bp, Artificial Sequence
  Description of Artificial Sequence: Synthetic oligonucleotide
gagctctgtcgcccaggctg

SEQ ID NO: 12617 - DNA, 20 bp, Artificial Sequence
  Description of Artificial Sequence: Synthetic oligonucleotide
agctctgtcgcccaggctgg

SEQ ID NO: 12618 - DNA, 20 bp, Artificial Sequence
  Description of Artificial Sequence: Synthetic oligonucleotide
gctctgtcgcccaggctgga

SEQ ID NO: 12619 - DNA, 20 bp, Artificial Sequence
  Description of Artificial Sequence: Synthetic oligonucleotide
ctctgtcgcccaggctggag

SEQ ID NO: 12620 - DNA, 20 bp, Artificial Sequence
  Description of Artificial Sequence: Synthetic oligonucleotide
tctgtcgcccaggctggagt

SEQ ID NO: 12621 - DNA, 20 bp, Artificial Sequence
  Description of Artificial Sequence: Synthetic oligonucleotide
ctgtcgcccaggctggagtg

SEQ ID NO: 12622 - DNA, 20 bp, Artificial Sequence
  Description of Artificial Sequence: Synthetic oligonucleotide
tgtcgcccaggctggagtgc

SEQ ID NO: 12623 - DNA, 20 bp, Artificial Sequence
  Description of Artificial Sequence: Synthetic oligonucleotide
gtcgcccaggctggagtgca

SEQ ID NO: 12624 - DNA, 20 bp, Artificial Sequence
  Description of Artificial Sequence: Synthetic oligonucleotide
tcgcccaggctggagtgcaa

SEQ ID NO: 12625 - DNA, 20 bp, Artificial Sequence
  Description of Artificial Sequence: Synthetic oligonucleotide
cgcccaggctggagtgcaat

SEQ ID NO: 12626 - DNA, 20 bp, Artificial Sequence
  Description of Artificial Sequence: Synthetic oligonucleotide
gcccaggctggagtgcaatg

SEQ ID NO: 12627 - DNA, 20 bp, Artificial Sequence
  Description of Artificial Sequence: Synthetic oligonucleotide
cccaggctggagtgcaatgg

SEQ ID NO: 12628 - DNA, 20 bp, Artificial Sequence
  Description of Artificial Sequence: Synthetic oligonucleotide
ccaggctggagtgcaatggc

SEQ ID NO: 12629 - DNA, 20 bp, Artificial Sequence
  Description of Artificial Sequence: Synthetic oligonucleotide
caggctggagtgcaatggca

SEQ ID NO: 12630 - DNA, 20 bp, Artificial Sequence
  Description of Artificial Sequence: Synthetic oligonucleotide
aggctggagtgcaatggcat

SEQ ID NO: 12631 - DNA, 20 bp, Artificial Sequence
  Description of Artificial Sequence: Synthetic oligonucleotide
ggctggagtgcaatggcatg

SEQ ID NO: 12632 - DNA, 20 bp, Artificial Sequence
  Description of Artificial Sequence: Synthetic oligonucleotide
gctggagtgcaatggcatga

SEQ ID NO: 12633 - DNA, 20 bp, Artificial Sequence
  Description of Artificial Sequence: Synthetic oligonucleotide
ctggagtgcaatggcatgat

SEQ ID NO: 12634 - DNA, 20 bp, Artificial Sequence
  Description of Artificial Sequence: Synthetic oligonucleotide
tggagtgcaatggcatgatc

SEQ ID NO: 12635 - DNA, 20 bp, Artificial Sequence
  Description of Artificial Sequence: Synthetic oligonucleotide
ggagtgcaatggcatgatcc

SEQ ID NO: 12636 - DNA, 20 bp, Artificial Sequence
  Description of Artificial Sequence: Synthetic oligonucleotide
gagtgcaatggcatgatccc

SEQ ID NO: 12637 - DNA, 20 bp, Artificial Sequence
  Description of Artificial Sequence: Synthetic oligonucleotide
agtgcaatggcatgatcccg

SEQ ID NO: 12638 - DNA, 20 bp, Artificial Sequence
  Description of Artificial Sequence: Synthetic oligonucleotide
gtgcaatggcatgatcccgg

SEQ ID NO: 12639 - DNA, 20 bp, Artificial Sequence
  Description of Artificial Sequence: Synthetic oligonucleotide
tgcaatggcatgatcccggc

SEQ ID NO: 12640 - DNA, 20 bp, Artificial Sequence
  Description of Artificial Sequence: Synthetic oligonucleotide
gcaatggcatgatcccggct

SEQ ID NO: 12641 - DNA, 20 bp, Artificial Sequence
  Description of Artificial Sequence: Synthetic oligonucleotide
caatggcatgatcccggctc

SEQ ID NO: 12642 - DNA, 20 bp, Artificial Sequence
  Description of Artificial Sequence: Synthetic oligonucleotide
aatggcatgatcccggctca

SEQ ID NO: 12643 - DNA, 20 bp, Artificial Sequence
  Description of Artificial Sequence: Synthetic oligonucleotide
atggcatgatcccggctcac

SEQ ID NO: 12644 - DNA, 20 bp, Artificial Sequence
  Description of Artificial Sequence: Synthetic oligonucleotide
tggcatgatcccggctcact

SEQ ID NO: 12645 - DNA, 20 bp, Artificial Sequence
  Description of Artificial Sequence: Synthetic oligonucleotide
ggcatgatcccggctcactg

SEQ ID NO: 12646 - DNA, 20 bp, Artificial Sequence
  Description of Artificial Sequence: Synthetic oligonucleotide
gcatgatcccggctcactgc

SEQ ID NO: 12647 - DNA, 20 bp, Artificial Sequence
  Description of Artificial Sequence: Synthetic oligonucleotide
catgatcccggctcactgca

SEQ ID NO: 12648 - DNA, 20 bp, Artificial Sequence
  Description of Artificial Sequence: Synthetic oligonucleotide
atgatcccggctcactgcaa

SEQ ID NO: 12649 - DNA, 20 bp, Artificial Sequence
  Description of Artificial Sequence: Synthetic oligonucleotide
tgatcccggctcactgcaac

SEQ ID NO: 12650 - DNA, 20 bp, Artificial Sequence
  Description of Artificial Sequence: Synthetic oligonucleotide
gatcccggctcactgcaacc

SEQ ID NO: 12651 - DNA, 20 bp, Artificial Sequence
  Description of Artificial Sequence: Synthetic oligonucleotide
atcccggctcactgcaacct

SEQ ID NO: 12652 - DNA, 20 bp, Artificial Sequence
  Description of Artificial Sequence: Synthetic oligonucleotide
tcccggctcactgcaacctc

SEQ ID NO: 12653 - DNA, 20 bp, Artificial Sequence
  Description of Artificial Sequence: Synthetic oligonucleotide
cccggctcactgcaacctcc

SEQ ID NO: 12654 - DNA, 20 bp, Artificial Sequence
  Description of Artificial Sequence: Synthetic oligonucleotide
ccggctcactgcaacctccg

SEQ ID NO: 12655 - DNA, 20 bp, Artificial Sequence
  Description of Artificial Sequence: Synthetic oligonucleotide
cggctcactgcaacctccgc

SEQ ID NO: 12656 - DNA, 20 bp, Artificial Sequence
  Description of Artificial Sequence: Synthetic oligonucleotide
ggctcactgcaacctccgcc

SEQ ID NO: 12657 - DNA, 20 bp, Artificial Sequence
  Description of Artificial Sequence: Synthetic oligonucleotide
gctcactgcaacctccgcct

SEQ ID NO: 12658 - DNA, 20 bp, Artificial Sequence
  Description of Artificial Sequence: Synthetic oligonucleotide
ctcactgcaacctccgcctc

SEQ ID NO: 12659 - DNA, 20 bp, Artificial Sequence
  Description of Artificial Sequence: Synthetic oligonucleotide
tcactgcaacctccgcctcc

SEQ ID NO: 12660 - DNA, 20 bp, Artificial Sequence
  Description of Artificial Sequence: Synthetic oligonucleotide
cactgcaacctccgcctccc

SEQ ID NO: 12661 - DNA, 20 bp, Artificial Sequence
  Description of Artificial Sequence: Synthetic oligonucleotide
actgcaacctccgcctcccg

SEQ ID NO: 12662 - DNA, 20 bp, Artificial Sequence
  Description of Artificial Sequence: Synthetic oligonucleotide
ctgcaacctccgcctcccgg

SEQ ID NO: 12663 - DNA, 20 bp, Artificial Sequence
  Description of Artificial Sequence: Synthetic oligonucleotide
tgcaacctccgcctcccggg

SEQ ID NO: 12664 - DNA, 20 bp, Artificial Sequence
  Description of Artificial Sequence: Synthetic oligonucleotide
gcaacctccgcctcccgggt

SEQ ID NO: 12665 - DNA, 20 bp, Artificial Sequence
  Description of Artificial Sequence: Synthetic oligonucleotide
caacctccgcctcccgggtt

SEQ ID NO: 12666 - DNA, 20 bp, Artificial Sequence
  Description of Artificial Sequence: Synthetic oligonucleotide
aacctccgcctcccgggttc

SEQ ID NO: 12667 - DNA, 20 bp, Artificial Sequence
  Description of Artificial Sequence: Synthetic oligonucleotide
acctccgcctcccgggttca

SEQ ID NO: 12668 - DNA, 20 bp, Artificial Sequence
  Description of Artificial Sequence: Synthetic oligonucleotide
cctccgcctcccgggttcaa

SEQ ID NO: 12669 - DNA, 20 bp, Artificial Sequence
  Description of Artificial Sequence: Synthetic oligonucleotide
ctccgcctcccgggttcaag

SEQ ID NO: 12670 - DNA, 20 bp, Artificial Sequence
  Description of Artificial Sequence: Synthetic oligonucleotide
tccgcctcccgggttcaaga

SEQ ID NO: 12671 - DNA, 20 bp, Artificial Sequence
  Description of Artificial Sequence: Synthetic oligonucleotide
ccgcctcccgggttcaagag

SEQ ID NO: 12672 - DNA, 20 bp, Artificial Sequence
  Description of Artificial Sequence: Synthetic oligonucleotide
cgcctcccgggttcaagagg

SEQ ID NO: 12673 - DNA, 20 bp, Artificial Sequence
  Description of Artificial Sequence: Synthetic oligonucleotide
gcctcccgggttcaagaggt

SEQ ID NO: 12674 - DNA, 20 bp, Artificial Sequence
  Description of Artificial Sequence: Synthetic oligonucleotide
cctcccgggttcaagaggtt

SEQ ID NO: 12675 - DNA, 20 bp, Artificial Sequence
  Description of Artificial Sequence: Synthetic oligonucleotide
ctcccgggttcaagaggttc

SEQ ID NO: 12676 - DNA, 20 bp, Artificial Sequence
  Description of Artificial Sequence: Synthetic oligonucleotide
tcccgggttcaagaggttct

SEQ ID NO: 12677 - DNA, 20 bp, Artificial Sequence
  Description of Artificial Sequence: Synthetic oligonucleotide
cccgggttcaagaggttctc

SEQ ID NO: 12678 - DNA, 20 bp, Artificial Sequence
  Description of Artificial Sequence: Synthetic oligonucleotide
ccgggttcaagaggttctcc

SEQ ID NO: 12679 - DNA, 20 bp, Artificial Sequence
  Description of Artificial Sequence: Synthetic oligonucleotide
cgggttcaagaggttctcct

SEQ ID NO: 12680 - DNA, 20 bp, Artificial Sequence
  Description of Artificial Sequence: Synthetic oligonucleotide
gggttcaagaggttctcctg

SEQ ID NO: 12681 - DNA, 20 bp, Artificial Sequence
  Description of Artificial Sequence: Synthetic oligonucleotide
ggttcaagaggttctcctgc

SEQ ID NO: 12682 - DNA, 20 bp, Artificial Sequence
  Description of Artificial Sequence: Synthetic oligonucleotide
gttcaagaggttctcctgcc

SEQ ID NO: 12683 - DNA, 20 bp, Artificial Sequence
  Description of Artificial Sequence: Synthetic oligonucleotide
ttcaagaggttctcctgcct

SEQ ID NO: 12684 - DNA, 20 bp, Artificial Sequence
  Description of Artificial Sequence: Synthetic oligonucleotide
tcaagaggttctcctgcctc

SEQ ID NO: 12685 - DNA, 20 bp, Artificial Sequence
  Description of Artificial Sequence: Synthetic oligonucleotide
caagaggttctcctgcctca

SEQ ID NO: 12686 - DNA, 20 bp, Artificial Sequence
  Description of Artificial Sequence: Synthetic oligonucleotide
aagaggttctcctgcctcag

SEQ ID NO: 12687 - DNA, 20 bp, Artificial Sequence
  Description of Artificial Sequence: Synthetic oligonucleotide
agaggttctcctgcctcagc

SEQ ID NO: 12688 - DNA, 20 bp, Artificial Sequence
  Description of Artificial Sequence: Synthetic oligonucleotide
gaggttctcctgcctcagcc

SEQ ID NO: 12689 - DNA, 20 bp, Artificial Sequence
  Description of Artificial Sequence: Synthetic oligonucleotide
aggttctcctgcctcagcct

SEQ ID NO: 12690 - DNA, 20 bp, Artificial Sequence
  Description of Artificial Sequence: Synthetic oligonucleotide
ggttctcctgcctcagcctc

SEQ ID NO: 12691 - DNA, 20 bp, Artificial Sequence
  Description of Artificial Sequence: Synthetic oligonucleotide
gttctcctgcctcagcctcc

SEQ ID NO: 12692 - DNA, 20 bp, Artificial Sequence
  Description of Artificial Sequence: Synthetic oligonucleotide
ttctcctgcctcagcctccc

SEQ ID NO: 12693 - DNA, 20 bp, Artificial Sequence
  Description of Artificial Sequence: Synthetic oligonucleotide
tctcctgcctcagcctcccc

SEQ ID NO: 12694 - DNA, 20 bp, Artificial Sequence
  Description of Artificial Sequence: Synthetic oligonucleotide
ctcctgcctcagcctcccca

SEQ ID NO: 12695 - DNA, 20 bp, Artificial Sequence
  Description of Artificial Sequence: Synthetic oligonucleotide
tcctgcctcagcctccccag

SEQ ID NO: 12696 - DNA, 20 bp, Artificial Sequence
  Description of Artificial Sequence: Synthetic oligonucleotide
cctgcctcagcctccccagt

SEQ ID NO: 12697 - DNA, 20 bp, Artificial Sequence
  Description of Artificial Sequence: Synthetic oligonucleotide
ctgcctcagcctccccagta

SEQ ID NO: 12698 - DNA, 20 bp, Artificial Sequence
  Description of Artificial Sequence: Synthetic oligonucleotide
tgcctcagcctccccagtag

SEQ ID NO: 12699 - DNA, 20 bp, Artificial Sequence
  Description of Artificial Sequence: Synthetic oligonucleotide
gcctcagcctccccagtagc

SEQ ID NO: 12700 - DNA, 20 bp, Artificial Sequence
  Description of Artificial Sequence: Synthetic oligonucleotide
cctcagcctccccagtagct

SEQ ID NO: 12701 - DNA, 20 bp, Artificial Sequence
  Description of Artificial Sequence: Synthetic oligonucleotide
ctcagcctccccagtagctg

SEQ ID NO: 12702 - DNA, 20 bp, Artificial Sequence
  Description of Artificial Sequence: Synthetic oligonucleotide
tcagcctccccagtagctgg

SEQ ID NO: 12703 - DNA, 20 bp, Artificial Sequence
  Description of Artificial Sequence: Synthetic oligonucleotide
cagcctccccagtagctggg

SEQ ID NO: 12704 - DNA, 20 bp, Artificial Sequence
  Description of Artificial Sequence: Synthetic oligonucleotide
agcctccccagtagctggga

SEQ ID NO: 12705 - DNA, 20 bp, Artificial Sequence
  Description of Artificial Sequence: Synthetic oligonucleotide
gcctccccagtagctgggat

SEQ ID NO: 12706 - DNA, 20 bp, Artificial Sequence
  Description of Artificial Sequence: Synthetic oligonucleotide
cctccccagtagctgggatt

SEQ ID NO: 12707 - DNA, 20 bp, Artificial Sequence
  Description of Artificial Sequence: Synthetic oligonucleotide
ctccccagtagctgggatta

SEQ ID NO: 12708 - DNA, 20 bp, Artificial Sequence
  Description of Artificial Sequence: Synthetic oligonucleotide
tccccagtagctgggattac

SEQ ID NO: 12709 - DNA, 20 bp, Artificial Sequence
  Description of Artificial Sequence: Synthetic oligonucleotide
ccccagtagctgggattaca

SEQ ID NO: 12710 - DNA, 20 bp, Artificial Sequence
  Description of Artificial Sequence: Synthetic oligonucleotide
cccagtagctgggattacag

SEQ ID NO: 12711 - DNA, 20 bp, Artificial Sequence
  Description of Artificial Sequence: Synthetic oligonucleotide
ccagtagctgggattacagg

SEQ ID NO: 12712 - DNA, 20 bp, Artificial Sequence
  Description of Artificial Sequence: Synthetic oligonucleotide
cagtagctgggattacaggc

SEQ ID NO: 12713 - DNA, 20 bp, Artificial Sequence
  Description of Artificial Sequence: Synthetic oligonucleotide
agtagctgggattacaggcg

SEQ ID NO: 12714 - DNA, 20 bp, Artificial Sequence
  Description of Artificial Sequence: Synthetic oligonucleotide
gtagctgggattacaggcgc

SEQ ID NO: 12715 - DNA, 20 bp, Artificial Sequence
  Description of Artificial Sequence: Synthetic oligonucleotide
tagctgggattacaggcgcc

SEQ ID NO: 12716 - DNA, 20 bp, Artificial Sequence
  Description of Artificial Sequence: Synthetic oligonucleotide
agctgggattacaggcgccc

SEQ ID NO: 12717 - DNA, 20 bp, Artificial Sequence
  Description of Artificial Sequence: Synthetic oligonucleotide
gctgggattacaggcgccca

SEQ ID NO: 12718 - DNA, 20 bp, Artificial Sequence
  Description of Artificial Sequence: Synthetic oligonucleotide
ctgggattacaggcgcccac

SEQ ID NO: 12719 - DNA, 20 bp, Artificial Sequence
  Description of Artificial Sequence: Synthetic oligonucleotide
tgggattacaggcgcccacc

SEQ ID NO: 12720 - DNA, 20 bp, Artificial Sequence
  Description of Artificial Sequence: Synthetic oligonucleotide
gggattacaggcgcccacca

SEQ ID NO: 12721 - DNA, 20 bp, Artificial Sequence
  Description of Artificial Sequence: Synthetic oligonucleotide
ggattacaggcgcccaccac

SEQ ID NO: 12722 - DNA, 20 bp, Artificial Sequence
  Description of Artificial Sequence: Synthetic oligonucleotide
gattacaggcgcccaccacc

SEQ ID NO: 12723 - DNA, 20 bp, Artificial Sequence
  Description of Artificial Sequence: Synthetic oligonucleotide
attacaggcgcccaccacca

SEQ ID NO: 12724 - DNA, 20 bp, Artificial Sequence
  Description of Artificial Sequence: Synthetic oligonucleotide
ttacaggcgcccaccaccac

SEQ ID NO: 12725 - DNA, 20 bp, Artificial Sequence
  Description of Artificial Sequence: Synthetic oligonucleotide
tacaggcgcccaccaccaca

SEQ ID NO: 12726 - DNA, 20 bp, Artificial Sequence
  Description of Artificial Sequence: Synthetic oligonucleotide
acaggcgcccaccaccacac

SEQ ID NO: 12727 - DNA, 20 bp, Artificial Sequence
  Description of Artificial Sequence: Synthetic oligonucleotide
caggcgcccaccaccacacc

SEQ ID NO: 12728 - DNA, 20 bp, Artificial Sequence
  Description of Artificial Sequence: Synthetic oligonucleotide
aggcgcccaccaccacaccc

SEQ ID NO: 12729 - DNA, 20 bp, Artificial Sequence
  Description of Artificial Sequence: Synthetic oligonucleotide
ggcgcccaccaccacaccca

SEQ ID NO: 12730 - DNA, 20 bp, Artificial Sequence
  Description of Artificial Sequence: Synthetic oligonucleotide
gcgcccaccaccacacccag

SEQ ID NO: 12731 - DNA, 20 bp, Artificial Sequence
  Description of Artificial Sequence: Synthetic oligonucleotide
cgcccaccaccacacccagc

SEQ ID NO: 12732 - DNA, 20 bp, Artificial Sequence
  Description of Artificial Sequence: Synthetic oligonucleotide
gcccaccaccacacccagct

SEQ ID NO: 12733 - DNA, 20 bp, Artificial Sequence
  Description of Artificial Sequence: Synthetic oligonucleotide
cccaccaccacacccagcta

SEQ ID NO: 12734 - DNA, 20 bp, Artificial Sequence
  Description of Artificial Sequence: Synthetic oligonucleotide
ccaccaccacacccagctaa

SEQ ID NO: 12735 - DNA, 20 bp, Artificial Sequence
  Description of Artificial Sequence: Synthetic oligonucleotide
caccaccacacccagctaat

SEQ ID NO: 12736 - DNA, 20 bp, Artificial Sequence
  Description of Artificial Sequence: Synthetic oligonucleotide
accaccacacccagctaatt

SEQ ID NO: 12737 - DNA, 20 bp, Artificial Sequence
  Description of Artificial Sequence: Synthetic oligonucleotide
ccaccacacccagctaattt

SEQ ID NO: 12738 - DNA, 20 bp, Artificial Sequence
  Description of Artificial Sequence: Synthetic oligonucleotide
caccacacccagctaatttt

SEQ ID NO: 12739 - DNA, 20 bp, Artificial Sequence
  Description of Artificial Sequence: Synthetic oligonucleotide
accacacccagctaattttt

SEQ ID NO: 12740 - DNA, 20 bp, Artificial Sequence
  Description of Artificial Sequence: Synthetic oligonucleotide
ccacacccagctaatttttg

SEQ ID NO: 12741 - DNA, 20 bp, Artificial Sequence
  Description of Artificial Sequence: Synthetic oligonucleotide
cacacccagctaatttttgt

SEQ ID NO: 12742 - DNA, 20 bp, Artificial Sequence
  Description of Artificial Sequence: Synthetic oligonucleotide
acacccagctaatttttgta

SEQ ID NO: 12743 - DNA, 20 bp, Artificial Sequence
  Description of Artificial Sequence: Synthetic oligonucleotide
cacccagctaatttttgtat

SEQ ID NO: 12744 - DNA, 20 bp, Artificial Sequence
  Description of Artificial Sequence: Synthetic oligonucleotide
acccagctaatttttgtatt

SEQ ID NO: 12745 - DNA, 20 bp, Artificial Sequence
  Description of Artificial Sequence: Synthetic oligonucleotide
cccagctaatttttgtattt

SEQ ID NO: 12746 - DNA, 20 bp, Artificial Sequence
  Description of Artificial Sequence: Synthetic oligonucleotide
ccagctaatttttgtatttt

SEQ ID NO: 12747 - DNA, 20 bp, Artificial Sequence
  Description of Artificial Sequence: Synthetic oligonucleotide
cagctaatttttgtattttt

SEQ ID NO: 12748 - DNA, 20 bp, Artificial Sequence
  Description of Artificial Sequence: Synthetic oligonucleotide
agctaatttttgtattttta

SEQ ID NO: 12749 - DNA, 20 bp, Artificial Sequence
  Description of Artificial Sequence: Synthetic oligonucleotide
gctaatttttgtatttttag

SEQ ID NO: 12750 - DNA, 20 bp, Artificial Sequence
  Description of Artificial Sequence: Synthetic oligonucleotide
ctaatttttgtatttttagt

SEQ ID NO: 12751 - DNA, 20 bp, Artificial Sequence
  Description of Artificial Sequence: Synthetic oligonucleotide
taatttttgtatttttagta

SEQ ID NO: 12752 - DNA, 20 bp, Artificial Sequence
  Description of Artificial Sequence: Synthetic oligonucleotide
aatttttgtatttttagtag

SEQ ID NO: 12753 - DNA, 20 bp, Artificial Sequence
  Description of Artificial Sequence: Synthetic oligonucleotide
atttttgtatttttagtaga

SEQ ID NO: 12754 - DNA, 20 bp, Artificial Sequence
  Description of Artificial Sequence: Synthetic oligonucleotide
tttttgtatttttagtagag

SEQ ID NO: 12755 - DNA, 20 bp, Artificial Sequence
  Description of Artificial Sequence: Synthetic oligonucleotide
ttttgtatttttagtagaga

SEQ ID NO: 12756 - DNA, 20 bp, Artificial Sequence
  Description of Artificial Sequence: Synthetic oligonucleotide
tttgtatttttagtagagac

SEQ ID NO: 12757 - DNA, 20 bp, Artificial Sequence
  Description of Artificial Sequence: Synthetic oligonucleotide
ttgtatttttagtagagacg

SEQ ID NO: 12758 - DNA, 20 bp, Artificial Sequence
  Description of Artificial Sequence: Synthetic oligonucleotide
tgtatttttagtagagacgg

SEQ ID NO: 12759 - DNA, 20 bp, Artificial Sequence
  Description of Artificial Sequence: Synthetic oligonucleotide
gtatttttagtagagacggg

SEQ ID NO: 12760 - DNA, 20 bp, Artificial Sequence
  Description of Artificial Sequence: Synthetic oligonucleotide
tatttttagtagagacgggg

SEQ ID NO: 12761 - DNA, 20 bp, Artificial Sequence
  Description of Artificial Sequence: Synthetic oligonucleotide
atttttagtagagacggggt

SEQ ID NO: 12762 - DNA, 20 bp, Artificial Sequence
  Description of Artificial Sequence: Synthetic oligonucleotide
tttttagtagagacggggtt

SEQ ID NO: 12763 - DNA, 20 bp, Artificial Sequence
  Description of Artificial Sequence: Synthetic oligonucleotide
ttttagtagagacggggttt

SEQ ID NO: 12764 - DNA, 20 bp, Artificial Sequence
  Description of Artificial Sequence: Synthetic oligonucleotide
tttagtagagacggggtttc

SEQ ID NO: 12765 - DNA, 20 bp, Artificial Sequence
  Description of Artificial Sequence: Synthetic oligonucleotide
ttagtagagacggggtttca

SEQ ID NO: 12766 - DNA, 20 bp, Artificial Sequence
  Description of Artificial Sequence: Synthetic oligonucleotide
tagtagagacggggtttcac

SEQ ID NO: 12767 - DNA, 20 bp, Artificial Sequence
  Description of Artificial Sequence: Synthetic oligonucleotide
agtagagacggggtttcact

SEQ ID NO: 12768 - DNA, 20 bp, Artificial Sequence
  Description of Artificial Sequence: Synthetic oligonucleotide
gtagagacggggtttcactg

SEQ ID NO: 12769 - DNA, 20 bp, Artificial Sequence
  Description of Artificial Sequence: Synthetic oligonucleotide
tagagacggggtttcactgt

SEQ ID NO: 12770 - DNA, 20 bp, Artificial Sequence
  Description of Artificial Sequence: Synthetic oligonucleotide
agagacggggtttcactgtg

SEQ ID NO: 12771 - DNA, 20 bp, Artificial Sequence
  Description of Artificial Sequence: Synthetic oligonucleotide
gagacggggtttcactgtgt

SEQ ID NO: 12772 - DNA, 20 bp, Artificial Sequence
  Description of Artificial Sequence: Synthetic oligonucleotide
agacggggtttcactgtgtt

SEQ ID NO: 12773 - DNA, 20 bp, Artificial Sequence
  Description of Artificial Sequence: Synthetic oligonucleotide
gacggggtttcactgtgttg

SEQ ID NO: 12774 - DNA, 20 bp, Artificial Sequence
  Description of Artificial Sequence: Synthetic oligonucleotide
acggggtttcactgtgttgg

SEQ ID NO: 12775 - DNA, 20 bp, Artificial Sequence
  Description of Artificial Sequence: Synthetic oligonucleotide
cggggtttcactgtgttggt

SEQ ID NO: 12776 - DNA, 20 bp, Artificial Sequence
  Description of Artificial Sequence: Synthetic oligonucleotide
ggggtttcactgtgttggtc

SEQ ID NO: 12777 - DNA, 20 bp, Artificial Sequence
  Description of Artificial Sequence: Synthetic oligonucleotide
gggtttcactgtgttggtca

SEQ ID NO: 12778 - DNA, 20 bp, Artificial Sequence
  Description of Artificial Sequence: Synthetic oligonucleotide
ggtttcactgtgttggtcag

SEQ ID NO: 12779 - DNA, 20 bp, Artificial Sequence
  Description of Artificial Sequence: Synthetic oligonucleotide
gtttcactgtgttggtcagg

SEQ ID NO: 12780 - DNA, 20 bp, Artificial Sequence
  Description of Artificial Sequence: Synthetic oligonucleotide
tttcactgtgttggtcaggc

SEQ ID NO: 12781 - DNA, 20 bp, Artificial Sequence
  Description of Artificial Sequence: Synthetic oligonucleotide
ttcactgtgttggtcaggct

SEQ ID NO: 12782 - DNA, 20 bp, Artificial Sequence
  Description of Artificial Sequence: Synthetic oligonucleotide
tcactgtgttggtcaggctg

SEQ ID NO: 12783 - DNA, 20 bp, Artificial Sequence
  Description of Artificial Sequence: Synthetic oligonucleotide
cactgtgttggtcaggctgg

SEQ ID NO: 12784 - DNA, 20 bp, Artificial Sequence
  Description of Artificial Sequence: Synthetic oligonucleotide
actgtgttggtcaggctggt

SEQ ID NO: 12785 - DNA, 20 bp, Artificial Sequence
  Description of Artificial Sequence: Synthetic oligonucleotide
ctgtgttggtcaggctggtc

SEQ ID NO: 12786 - DNA, 20 bp, Artificial Sequence
  Description of Artificial Sequence: Synthetic oligonucleotide
tgtgttggtcaggctggtct

SEQ ID NO: 12787 - DNA, 20 bp, Artificial Sequence
  Description of Artificial Sequence: Synthetic oligonucleotide
gtgttggtcaggctggtctt

SEQ ID NO: 12788 - DNA, 20 bp, Artificial Sequence
  Description of Artificial Sequence: Synthetic oligonucleotide
tgttggtcaggctggtcttg

SEQ ID NO: 12789 - DNA, 20 bp, Artificial Sequence
  Description of Artificial Sequence: Synthetic oligonucleotide
gttggtcaggctggtcttga

SEQ ID NO: 12790 - DNA, 20 bp, Artificial Sequence
  Description of Artificial Sequence: Synthetic oligonucleotide
ttggtcaggctggtcttgaa

SEQ ID NO: 12791 - DNA, 20 bp, Artificial Sequence
  Description of Artificial Sequence: Synthetic oligonucleotide
tggtcaggctggtcttgaac

SEQ ID NO: 12792 - DNA, 20 bp, Artificial Sequence
  Description of Artificial Sequence: Synthetic oligonucleotide
ggtcaggctggtcttgaact

SEQ ID NO: 12793 - DNA, 20 bp, Artificial Sequence
  Description of Artificial Sequence: Synthetic oligonucleotide
gtcaggctggtcttgaactc

SEQ ID NO: 12794 - DNA, 20 bp, Artificial Sequence
  Description of Artificial Sequence: Synthetic oligonucleotide
tcaggctggtcttgaactcc

SEQ ID NO: 12795 - DNA, 20 bp, Artificial Sequence
  Description of Artificial Sequence: Synthetic oligonucleotide
caggctggtcttgaactcct

SEQ ID NO: 12796 - DNA, 20 bp, Artificial Sequence
  Description of Artificial Sequence: Synthetic oligonucleotide
aggctggtcttgaactcctg

SEQ ID NO: 12797 - DNA, 20 bp, Artificial Sequence
  Description of Artificial Sequence: Synthetic oligonucleotide
ggctggtcttgaactcctga

SEQ ID NO: 12798 - DNA, 20 bp, Artificial Sequence
  Description of Artificial Sequence: Synthetic oligonucleotide
gctggtcttgaactcctgac

SEQ ID NO: 12799 - DNA, 20 bp, Artificial Sequence
  Description of Artificial Sequence: Synthetic oligonucleotide
ctggtcttgaactcctgacc

SEQ ID NO: 12800 - DNA, 20 bp, Artificial Sequence
  Description of Artificial Sequence: Synthetic oligonucleotide
tggtcttgaactcctgacct

SEQ ID NO: 12801 - DNA, 20 bp, Artificial Sequence
  Description of Artificial Sequence: Synthetic oligonucleotide
ggtcttgaactcctgacctc

SEQ ID NO: 12802 - DNA, 20 bp, Artificial Sequence
  Description of Artificial Sequence: Synthetic oligonucleotide
gtcttgaactcctgacctca

SEQ ID NO: 12803 - DNA, 20 bp, Artificial Sequence
  Description of Artificial Sequence: Synthetic oligonucleotide
tcttgaactcctgacctcag

SEQ ID NO: 12804 - DNA, 20 bp, Artificial Sequence
  Description of Artificial Sequence: Synthetic oligonucleotide
cttgaactcctgacctcagg

SEQ ID NO: 12805 - DNA, 20 bp, Artificial Sequence
  Description of Artificial Sequence: Synthetic oligonucleotide
ttgaactcctgacctcaggt

SEQ ID NO: 12806 - DNA, 20 bp, Artificial Sequence
  Description of Artificial Sequence: Synthetic oligonucleotide
tgaactcctgacctcaggtg

SEQ ID NO: 12807 - DNA, 20 bp, Artificial Sequence
  Description of Artificial Sequence: Synthetic oligonucleotide
gaactcctgacctcaggtga

SEQ ID NO: 12808 - DNA, 20 bp, Artificial Sequence
  Description of Artificial Sequence: Synthetic oligonucleotide
aactcctgacctcaggtgat

SEQ ID NO: 12809 - DNA, 20 bp, Artificial Sequence
  Description of Artificial Sequence: Synthetic oligonucleotide
actcctgacctcaggtgatc

SEQ ID NO: 12810 - DNA, 20 bp, Artificial Sequence
  Description of Artificial Sequence: Synthetic oligonucleotide
ctcctgacctcaggtgatcc

SEQ ID NO: 12811 - DNA, 20 bp, Artificial Sequence
  Description of Artificial Sequence: Synthetic oligonucleotide
tcctgacctcaggtgatcca

SEQ ID NO: 12812 - DNA, 20 bp, Artificial Sequence
  Description of Artificial Sequence: Synthetic oligonucleotide
cctgacctcaggtgatccac

SEQ ID NO: 12813 - DNA, 20 bp, Artificial Sequence
  Description of Artificial Sequence: Synthetic oligonucleotide
ctgacctcaggtgatccact

SEQ ID NO: 12814 - DNA, 20 bp, Artificial Sequence
  Description of Artificial Sequence: Synthetic oligonucleotide
tgacctcaggtgatccactg

SEQ ID NO: 12815 - DNA, 20 bp, Artificial Sequence
  Description of Artificial Sequence: Synthetic oligonucleotide
gacctcaggtgatccactgg

SEQ ID NO: 12816 - DNA, 20 bp, Artificial Sequence
  Description of Artificial Sequence: Synthetic oligonucleotide
acctcaggtgatccactggc

SEQ ID NO: 12817 - DNA, 20 bp, Artificial Sequence
  Description of Artificial Sequence: Synthetic oligonucleotide
cctcaggtgatccactggcc

SEQ ID NO: 12818 - DNA, 20 bp, Artificial Sequence
  Description of Artificial Sequence: Synthetic oligonucleotide
ctcaggtgatccactggcct

SEQ ID NO: 12819 - DNA, 20 bp, Artificial Sequence
  Description of Artificial Sequence: Synthetic oligonucleotide
tcaggtgatccactggcctc

SEQ ID NO: 12820 - DNA, 20 bp, Artificial Sequence
  Description of Artificial Sequence: Synthetic oligonucleotide
caggtgatccactggcctcg

SEQ ID NO: 12821 - DNA, 20 bp, Artificial Sequence
  Description of Artificial Sequence: Synthetic oligonucleotide
aggtgatccactggcctcgc

SEQ ID NO: 12822 - DNA, 20 bp, Artificial Sequence
  Description of Artificial Sequence: Synthetic oligonucleotide
ggtgatccactggcctcgcc

SEQ ID NO: 12823 - DNA, 20 bp, Artificial Sequence
  Description of Artificial Sequence: Synthetic oligonucleotide
gtgatccactggcctcgccc

SEQ ID NO: 12824 - DNA, 20 bp, Artificial Sequence
  Description of Artificial Sequence: Synthetic oligonucleotide
tgatccactggcctcgccct

SEQ ID NO: 12825 - DNA, 20 bp, Artificial Sequence
  Description of Artificial Sequence: Synthetic oligonucleotide
gatccactggcctcgccctc

SEQ ID NO: 12826 - DNA, 20 bp, Artificial Sequence
  Description of Artificial Sequence: Synthetic oligonucleotide
atccactggcctcgccctcc

SEQ ID NO: 12827 - DNA, 20 bp, Artificial Sequence
  Description of Artificial Sequence: Synthetic oligonucleotide
tccactggcctcgccctccc

SEQ ID NO: 12828 - DNA, 20 bp, Artificial Sequence
  Description of Artificial Sequence: Synthetic oligonucleotide
ccactggcctcgccctccca

SEQ ID NO: 12829 - DNA, 20 bp, Artificial Sequence
  Description of Artificial Sequence: Synthetic oligonucleotide
cactggcctcgccctcccaa

SEQ ID NO: 12830 - DNA, 20 bp, Artificial Sequence
  Description of Artificial Sequence: Synthetic oligonucleotide
actggcctcgccctcccaaa

SEQ ID NO: 12831 - DNA, 20 bp, Artificial Sequence
  Description of Artificial Sequence: Synthetic oligonucleotide
ctggcctcgccctcccaaag

SEQ ID NO: 12832 - DNA, 20 bp, Artificial Sequence
  Description of Artificial Sequence: Synthetic oligonucleotide
tggcctcgccctcccaaagt

SEQ ID NO: 12833 - DNA, 20 bp, Artificial Sequence
  Description of Artificial Sequence: Synthetic oligonucleotide
ggcctcgccctcccaaagtg

SEQ ID NO: 12834 - DNA, 20 bp, Artificial Sequence
  Description of Artificial Sequence: Synthetic oligonucleotide
gcctcgccctcccaaagtgc

SEQ ID NO: 12835 - DNA, 20 bp, Artificial Sequence
  Description of Artificial Sequence: Synthetic oligonucleotide
cctcgccctcccaaagtgct

SEQ ID NO: 12836 - DNA, 20 bp, Artificial Sequence
  Description of Artificial Sequence: Synthetic oligonucleotide
ctcgccctcccaaagtgctg

SEQ ID NO: 12837 - DNA, 20 bp, Artificial Sequence
  Description of Artificial Sequence: Synthetic oligonucleotide
tcgccctcccaaagtgctgg

SEQ ID NO: 12838 - DNA, 20 bp, Artificial Sequence
  Description of Artificial Sequence: Synthetic oligonucleotide
cgccctcccaaagtgctggg

SEQ ID NO: 12839 - DNA, 20 bp, Artificial Sequence
  Description of Artificial Sequence: Synthetic oligonucleotide
gccctcccaaagtgctggga

SEQ ID NO: 12840 - DNA, 20 bp, Artificial Sequence
  Description of Artificial Sequence: Synthetic oligonucleotide
ccctcccaaagtgctgggac

SEQ ID NO: 12841 - DNA, 20 bp, Artificial Sequence
  Description of Artificial Sequence: Synthetic oligonucleotide
cctcccaaagtgctgggact

SEQ ID NO: 12842 - DNA, 20 bp, Artificial Sequence
  Description of Artificial Sequence: Synthetic oligonucleotide
ctcccaaagtgctgggacta

SEQ ID NO: 12843 - DNA, 20 bp, Artificial Sequence
  Description of Artificial Sequence: Synthetic oligonucleotide
tcccaaagtgctgggactac

SEQ ID NO: 12844 - DNA, 20 bp, Artificial Sequence
  Description of Artificial Sequence: Synthetic oligonucleotide
cccaaagtgctgggactaca

SEQ ID NO: 12845 - DNA, 20 bp, Artificial Sequence
  Description of Artificial Sequence: Synthetic oligonucleotide
ccaaagtgctgggactacaa

SEQ ID NO: 12846 - DNA, 20 bp, Artificial Sequence
  Description of Artificial Sequence: Synthetic oligonucleotide
caaagtgctgggactacaag

SEQ ID NO: 12847 - DNA, 20 bp, Artificial Sequence
  Description of Artificial Sequence: Synthetic oligonucleotide
aaagtgctgggactacaagc

SEQ ID NO: 12848 - DNA, 20 bp, Artificial Sequence
  Description of Artificial Sequence: Synthetic oligonucleotide
aagtgctgggactacaagcg

SEQ ID NO: 12849 - DNA, 20 bp, Artificial Sequence
  Description of Artificial Sequence: Synthetic oligonucleotide
agtgctgggactacaagcgt

SEQ ID NO: 12850 - DNA, 20 bp, Artificial Sequence
  Description of Artificial Sequence: Synthetic oligonucleotide
gtgctgggactacaagcgtg

SEQ ID NO: 12851 - DNA, 20 bp, Artificial Sequence
  Description of Artificial Sequence: Synthetic oligonucleotide
tgctgggactacaagcgtga

SEQ ID NO: 12852 - DNA, 20 bp, Artificial Sequence
  Description of Artificial Sequence: Synthetic oligonucleotide
gctgggactacaagcgtgag

SEQ ID NO: 12853 - DNA, 20 bp, Artificial Sequence
  Description of Artificial Sequence: Synthetic oligonucleotide
ctgggactacaagcgtgagt

SEQ ID NO: 12854 - DNA, 20 bp, Artificial Sequence
  Description of Artificial Sequence: Synthetic oligonucleotide
tgggactacaagcgtgagtc

SEQ ID NO: 12855 - DNA, 20 bp, Artificial Sequence
  Description of Artificial Sequence: Synthetic oligonucleotide
gggactacaagcgtgagtca

SEQ ID NO: 12856 - DNA, 20 bp, Artificial Sequence
  Description of Artificial Sequence: Synthetic oligonucleotide
ggactacaagcgtgagtcac

SEQ ID NO: 12857 - DNA, 20 bp, Artificial Sequence
  Description of Artificial Sequence: Synthetic oligonucleotide
gactacaagcgtgagtcacc

SEQ ID NO: 12858 - DNA, 20 bp, Artificial Sequence
  Description of Artificial Sequence: Synthetic oligonucleotide
actacaagcgtgagtcaccg

SEQ ID NO: 12859 - DNA, 20 bp, Artificial Sequence
  Description of Artificial Sequence: Synthetic oligonucleotide
ctacaagcgtgagtcaccgc

SEQ ID NO: 12860 - DNA, 20 bp, Artificial Sequence
  Description of Artificial Sequence: Synthetic oligonucleotide
tacaagcgtgagtcaccgca

SEQ ID NO: 12861 - DNA, 20 bp, Artificial Sequence
  Description of Artificial Sequence: Synthetic oligonucleotide
acaagcgtgagtcaccgcac

SEQ ID NO: 12862 - DNA, 20 bp, Artificial Sequence
  Description of Artificial Sequence: Synthetic oligonucleotide
caagcgtgagtcaccgcacc

SEQ ID NO: 12863 - DNA, 20 bp, Artificial Sequence
  Description of Artificial Sequence: Synthetic oligonucleotide
aagcgtgagtcaccgcacct

SEQ ID NO: 12864 - DNA, 20 bp, Artificial Sequence
  Description of Artificial Sequence: Synthetic oligonucleotide
agcgtgagtcaccgcacctg

SEQ ID NO: 12865 - DNA, 20 bp, Artificial Sequence
  Description of Artificial Sequence: Synthetic oligonucleotide
gcgtgagtcaccgcacctgg

SEQ ID NO: 12866 - DNA, 20 bp, Artificial Sequence
  Description of Artificial Sequence: Synthetic oligonucleotide
cgtgagtcaccgcacctggc

SEQ ID NO: 12867 - DNA, 20 bp, Artificial Sequence
  Description of Artificial Sequence: Synthetic oligonucleotide
gtgagtcaccgcacctggct

SEQ ID NO: 12868 - DNA, 20 bp, Artificial Sequence
  Description of Artificial Sequence: Synthetic oligonucleotide
tgagtcaccgcacctggctt

SEQ ID NO: 12869 - DNA, 20 bp, Artificial Sequence
  Description of Artificial Sequence: Synthetic oligonucleotide
gagtcaccgcacctggcttt

SEQ ID NO: 12870 - DNA, 20 bp, Artificial Sequence
  Description of Artificial Sequence: Synthetic oligonucleotide
agtcaccgcacctggcttta

SEQ ID NO: 12871 - DNA, 20 bp, Artificial Sequence
  Description of Artificial Sequence: Synthetic oligonucleotide
gtcaccgcacctggctttat

SEQ ID NO: 12872 - DNA, 20 bp, Artificial Sequence
  Description of Artificial Sequence: Synthetic oligonucleotide
tcaccgcacctggctttatt

SEQ ID NO: 12873 - DNA, 20 bp, Artificial Sequence
  Description of Artificial Sequence: Synthetic oligonucleotide
caccgcacctggctttattt

SEQ ID NO: 12874 - DNA, 20 bp, Artificial Sequence
  Description of Artificial Sequence: Synthetic oligonucleotide
accgcacctggctttatttt

SEQ ID NO: 12875 - DNA, 20 bp, Artificial Sequence
  Description of Artificial Sequence: Synthetic oligonucleotide
ccgcacctggctttattttt

SEQ ID NO: 12876 - DNA, 20 bp, Artificial Sequence
  Description of Artificial Sequence: Synthetic oligonucleotide
cgcacctggctttattttta

SEQ ID NO: 12877 - DNA, 20 bp, Artificial Sequence
  Description of Artificial Sequence: Synthetic oligonucleotide
gcacctggctttatttttat

SEQ ID NO: 12878 - DNA, 20 bp, Artificial Sequence
  Description of Artificial Sequence: Synthetic oligonucleotide
cacctggctttatttttatt

SEQ ID NO: 12879 - DNA, 20 bp, Artificial Sequence
  Description of Artificial Sequence: Synthetic oligonucleotide
acctggctttatttttattt

SEQ ID NO: 12880 - DNA, 20 bp, Artificial Sequence
  Description of Artificial Sequence: Synthetic oligonucleotide
cctggctttatttttatttt

SEQ ID NO: 12881 - DNA, 20 bp, Artificial Sequence
  Description of Artificial Sequence: Synthetic oligonucleotide
ctggctttatttttatttta

SEQ ID NO: 12882 - DNA, 20 bp, Artificial Sequence
  Description of Artificial Sequence: Synthetic oligonucleotide
tggctttatttttattttat

SEQ ID NO: 12883 - DNA, 20 bp, Artificial Sequence
  Description of Artificial Sequence: Synthetic oligonucleotide
ggctttatttttattttatc

SEQ ID NO: 12884 - DNA, 20 bp, Artificial Sequence
  Description of Artificial Sequence: Synthetic oligonucleotide
gctttatttttattttatcg

SEQ ID NO: 12885 - DNA, 20 bp, Artificial Sequence
  Description of Artificial Sequence: Synthetic oligonucleotide
ctttatttttattttatcgc

SEQ ID NO: 12886 - DNA, 20 bp, Artificial Sequence
  Description of Artificial Sequence: Synthetic oligonucleotide
tttatttttattttatcgct

SEQ ID NO: 12887 - DNA, 20 bp, Artificial Sequence
  Description of Artificial Sequence: Synthetic oligonucleotide
ttatttttattttatcgcta

SEQ ID NO: 12888 - DNA, 20 bp, Artificial Sequence
  Description of Artificial Sequence: Synthetic oligonucleotide
tatttttattttatcgctat

SEQ ID NO: 12889 - DNA, 20 bp, Artificial Sequence
  Description of Artificial Sequence: Synthetic oligonucleotide
atttttattttatcgctatt

SEQ ID NO: 12890 - DNA, 20 bp, Artificial Sequence
  Description of Artificial Sequence: Synthetic oligonucleotide
tttttattttatcgctatta

SEQ ID NO: 12891 - DNA, 20 bp, Artificial Sequence
  Description of Artificial Sequence: Synthetic oligonucleotide
ttttattttatcgctattat

SEQ ID NO: 12892 - DNA, 20 bp, Artificial Sequence
  Description of Artificial Sequence: Synthetic oligonucleotide
tttattttatcgctattatt

SEQ ID NO: 12893 - DNA, 20 bp, Artificial Sequence
  Description of Artificial Sequence: Synthetic oligonucleotide
ttattttatcgctattattt

SEQ ID NO: 12894 - DNA, 20 bp, Artificial Sequence
  Description of Artificial Sequence: Synthetic oligonucleotide
tattttatcgctattatttt

SEQ ID NO: 12895 - DNA, 20 bp, Artificial Sequence
  Description of Artificial Sequence: Synthetic oligonucleotide
attttatcgctattattttt

SEQ ID NO: 12896 - DNA, 20 bp, Artificial Sequence
  Description of Artificial Sequence: Synthetic oligonucleotide
ttttatcgctattatttttt

SEQ ID NO: 12897 - DNA, 20 bp, Artificial Sequence
  Description of Artificial Sequence: Synthetic oligonucleotide
tttatcgctattattttttt

SEQ ID NO: 12898 - DNA, 20 bp, Artificial Sequence
  Description of Artificial Sequence: Synthetic oligonucleotide
ttatcgctattatttttttg

SEQ ID NO: 12899 - DNA, 20 bp, Artificial Sequence
  Description of Artificial Sequence: Synthetic oligonucleotide
tatcgctattatttttttga

SEQ ID NO: 12900 - DNA, 20 bp, Artificial Sequence
  Description of Artificial Sequence: Synthetic oligonucleotide
atcgctattatttttttgag

SEQ ID NO: 12901 - DNA, 20 bp, Artificial Sequence
  Description of Artificial Sequence: Synthetic oligonucleotide
tcgctattatttttttgagg

SEQ ID NO: 12902 - DNA, 20 bp, Artificial Sequence
  Description of Artificial Sequence: Synthetic oligonucleotide
cgctattatttttttgagga

SEQ ID NO: 12903 - DNA, 20 bp, Artificial Sequence
  Description of Artificial Sequence: Synthetic oligonucleotide
gctattatttttttgaggag

SEQ ID NO: 12904 - DNA, 20 bp, Artificial Sequence
  Description of Artificial Sequence: Synthetic oligonucleotide
ctattatttttttgaggagt

SEQ ID NO: 12905 - DNA, 20 bp, Artificial Sequence
  Description of Artificial Sequence: Synthetic oligonucleotide
tattatttttttgaggagtc

SEQ ID NO: 12906 - DNA, 20 bp, Artificial Sequence
  Description of Artificial Sequence: Synthetic oligonucleotide
attatttttttgaggagtct

SEQ ID NO: 12907 - DNA, 20 bp, Artificial Sequence
  Description of Artificial Sequence: Synthetic oligonucleotide
ttatttttttgaggagtctc

SEQ ID NO: 12908 - DNA, 20 bp, Artificial Sequence
  Description of Artificial Sequence: Synthetic oligonucleotide
tatttttttgaggagtctca

SEQ ID NO: 12909 - DNA, 20 bp, Artificial Sequence
  Description of Artificial Sequence: Synthetic oligonucleotide
atttttttgaggagtctcac

SEQ ID NO: 12910 - DNA, 20 bp, Artificial Sequence
  Description of Artificial Sequence: Synthetic oligonucleotide
tttttttgaggagtctcact

SEQ ID NO: 12911 - DNA, 20 bp, Artificial Sequence
  Description of Artificial Sequence: Synthetic oligonucleotide
ttttttgaggagtctcactc

SEQ ID NO: 12912 - DNA, 20 bp, Artificial Sequence
  Description of Artificial Sequence: Synthetic oligonucleotide
tttttgaggagtctcactct

SEQ ID NO: 12913 - DNA, 20 bp, Artificial Sequence
  Description of Artificial Sequence: Synthetic oligonucleotide
ttttgaggagtctcactctg

SEQ ID NO: 12914 - DNA, 20 bp, Artificial Sequence
  Description of Artificial Sequence: Synthetic oligonucleotide
tttgaggagtctcactctgt

SEQ ID NO: 12915 - DNA, 20 bp, Artificial Sequence
  Description of Artificial Sequence: Synthetic oligonucleotide
ttgaggagtctcactctgtt

SEQ ID NO: 12916 - DNA, 20 bp, Artificial Sequence
  Description of Artificial Sequence: Synthetic oligonucleotide
tgaggagtctcactctgttg

SEQ ID NO: 12917 - DNA, 20 bp, Artificial Sequence
  Description of Artificial Sequence: Synthetic oligonucleotide
gaggagtctcactctgttgc

SEQ ID NO: 12918 - DNA, 20 bp, Artificial Sequence
  Description of Artificial Sequence: Synthetic oligonucleotide
aggagtctcactctgttgcc

SEQ ID NO: 12919 - DNA, 20 bp, Artificial Sequence
  Description of Artificial Sequence: Synthetic oligonucleotide
ggagtctcactctgttgccc

SEQ ID NO: 12920 - DNA, 20 bp, Artificial Sequence
  Description of Artificial Sequence: Synthetic oligonucleotide
gagtctcactctgttgccca

SEQ ID NO: 12921 - DNA, 20 bp, Artificial Sequence
  Description of Artificial Sequence: Synthetic oligonucleotide
agtctcactctgttgcccag

SEQ ID NO: 12922 - DNA, 20 bp, Artificial Sequence
  Description of Artificial Sequence: Synthetic oligonucleotide
gtctcactctgttgcccagg

SEQ ID NO: 12923 - DNA, 20 bp, Artificial Sequence
  Description of Artificial Sequence: Synthetic oligonucleotide
tctcactctgttgcccaggc

SEQ ID NO: 12924 - DNA, 20 bp, Artificial Sequence
  Description of Artificial Sequence: Synthetic oligonucleotide
ctcactctgttgcccaggct

SEQ ID NO: 12925 - DNA, 20 bp, Artificial Sequence
  Description of Artificial Sequence: Synthetic oligonucleotide
tcactctgttgcccaggctg

SEQ ID NO: 12926 - DNA, 20 bp, Artificial Sequence
  Description of Artificial Sequence: Synthetic oligonucleotide
cactctgttgcccaggctgg

SEQ ID NO: 12927 - DNA, 20 bp, Artificial Sequence
  Description of Artificial Sequence: Synthetic oligonucleotide
actctgttgcccaggctgga

SEQ ID NO: 12928 - DNA, 20 bp, Artificial Sequence
  Description of Artificial Sequence: Synthetic oligonucleotide
ctctgttgcccaggctggag

SEQ ID NO: 12929 - DNA, 20 bp, Artificial Sequence
  Description of Artificial Sequence: Synthetic oligonucleotide
tctgttgcccaggctggagt

SEQ ID NO: 12930 - DNA, 20 bp, Artificial Sequence
  Description of Artificial Sequence: Synthetic oligonucleotide
ctgttgcccaggctggagtg

SEQ ID NO: 12931 - DNA, 20 bp, Artificial Sequence
  Description of Artificial Sequence: Synthetic oligonucleotide
tgttgcccaggctggagtgc

SEQ ID NO: 12932 - DNA, 20 bp, Artificial Sequence
  Description of Artificial Sequence: Synthetic oligonucleotide
gttgcccaggctggagtgca

SEQ ID NO: 12933 - DNA, 20 bp, Artificial Sequence
  Description of Artificial Sequence: Synthetic oligonucleotide
ttgcccaggctggagtgcag

SEQ ID NO: 12934 - DNA, 20 bp, Artificial Sequence
  Description of Artificial Sequence: Synthetic oligonucleotide
tgcccaggctggagtgcagt

SEQ ID NO: 12935 - DNA, 20 bp, Artificial Sequence
  Description of Artificial Sequence: Synthetic oligonucleotide
gcccaggctggagtgcagtg

SEQ ID NO: 12936 - DNA, 20 bp, Artificial Sequence
  Description of Artificial Sequence: Synthetic oligonucleotide
cccaggctggagtgcagtgc

SEQ ID NO: 12937 - DNA, 20 bp, Artificial Sequence
  Description of Artificial Sequence: Synthetic oligonucleotide
ccaggctggagtgcagtgct

SEQ ID NO: 12938 - DNA, 20 bp, Artificial Sequence
  Description of Artificial Sequence: Synthetic oligonucleotide
caggctggagtgcagtgctg

SEQ ID NO: 12939 - DNA, 20 bp, Artificial Sequence
  Description of Artificial Sequence: Synthetic oligonucleotide
aggctggagtgcagtgctgc

SEQ ID NO: 12940 - DNA, 20 bp, Artificial Sequence
  Description of Artificial Sequence: Synthetic oligonucleotide
ggctggagtgcagtgctgcg

SEQ ID NO: 12941 - DNA, 20 bp, Artificial Sequence
  Description of Artificial Sequence: Synthetic oligonucleotide
gctggagtgcagtgctgcga

SEQ ID NO: 12942 - DNA, 20 bp, Artificial Sequence
  Description of Artificial Sequence: Synthetic oligonucleotide
ctggagtgcagtgctgcgat

SEQ ID NO: 12943 - DNA, 20 bp, Artificial Sequence
  Description of Artificial Sequence: Synthetic oligonucleotide
tggagtgcagtgctgcgatc

SEQ ID NO: 12944 - DNA, 20 bp, Artificial Sequence
  Description of Artificial Sequence: Synthetic oligonucleotide
ggagtgcagtgctgcgatct

SEQ ID NO: 12945 - DNA, 20 bp, Artificial Sequence
  Description of Artificial Sequence: Synthetic oligonucleotide
gagtgcagtgctgcgatctc

SEQ ID NO: 12946 - DNA, 20 bp, Artificial Sequence
  Description of Artificial Sequence: Synthetic oligonucleotide
agtgcagtgctgcgatctcg

SEQ ID NO: 12947 - DNA, 20 bp, Artificial Sequence
  Description of Artificial Sequence: Synthetic oligonucleotide
gtgcagtgctgcgatctcgg

SEQ ID NO: 12948 - DNA, 20 bp, Artificial Sequence
  Description of Artificial Sequence: Synthetic oligonucleotide
tgcagtgctgcgatctcggc

SEQ ID NO: 12949 - DNA, 20 bp, Artificial Sequence
  Description of Artificial Sequence: Synthetic oligonucleotide
gcagtgctgcgatctcggct

SEQ ID NO: 12950 - DNA, 20 bp, Artificial Sequence
  Description of Artificial Sequence: Synthetic oligonucleotide
cagtgctgcgatctcggctc

SEQ ID NO: 12951 - DNA, 20 bp, Artificial Sequence
  Description of Artificial Sequence: Synthetic oligonucleotide
agtgctgcgatctcggctca

SEQ ID NO: 12952 - DNA, 20 bp, Artificial Sequence
  Description of Artificial Sequence: Synthetic oligonucleotide
gtgctgcgatctcggctcac

SEQ ID NO: 12953 - DNA, 20 bp, Artificial Sequence
  Description of Artificial Sequence: Synthetic oligonucleotide
tgctgcgatctcggctcact

SEQ ID NO: 12954 - DNA, 20 bp, Artificial Sequence
  Description of Artificial Sequence: Synthetic oligonucleotide
gctgcgatctcggctcactg

SEQ ID NO: 12955 - DNA, 20 bp, Artificial Sequence
  Description of Artificial Sequence: Synthetic oligonucleotide
ctgcgatctcggctcactgc

SEQ ID NO: 12956 - DNA, 20 bp, Artificial Sequence
  Description of Artificial Sequence: Synthetic oligonucleotide
tgcgatctcggctcactgca

SEQ ID NO: 12957 - DNA, 20 bp, Artificial Sequence
  Description of Artificial Sequence: Synthetic oligonucleotide
gcgatctcggctcactgcaa

SEQ ID NO: 12958 - DNA, 20 bp, Artificial Sequence
  Description of Artificial Sequence: Synthetic oligonucleotide
cgatctcggctcactgcaac

SEQ ID NO: 12959 - DNA, 20 bp, Artificial Sequence
  Description of Artificial Sequence: Synthetic oligonucleotide
gatctcggctcactgcaacc

SEQ ID NO: 12960 - DNA, 20 bp, Artificial Sequence
  Description of Artificial Sequence: Synthetic oligonucleotide
atctcggctcactgcaacct

SEQ ID NO: 12961 - DNA, 20 bp, Artificial Sequence
  Description of Artificial Sequence: Synthetic oligonucleotide
tctcggctcactgcaacctc

SEQ ID NO: 12962 - DNA, 20 bp, Artificial Sequence
  Description of Artificial Sequence: Synthetic oligonucleotide
ctcggctcactgcaacctct

SEQ ID NO: 12963 - DNA, 20 bp, Artificial Sequence
  Description of Artificial Sequence: Synthetic oligonucleotide
tcggctcactgcaacctctg

SEQ ID NO: 12964 - DNA, 20 bp, Artificial Sequence
  Description of Artificial Sequence: Synthetic oligonucleotide
cggctcactgcaacctctgc

SEQ ID NO: 12965 - DNA, 20 bp, Artificial Sequence
  Description of Artificial Sequence: Synthetic oligonucleotide
ggctcactgcaacctctgcc

SEQ ID NO: 12966 - DNA, 20 bp, Artificial Sequence
  Description of Artificial Sequence: Synthetic oligonucleotide
gctcactgcaacctctgcct

SEQ ID NO: 12967 - DNA, 20 bp, Artificial Sequence
  Description of Artificial Sequence: Synthetic oligonucleotide
ctcactgcaacctctgcctc

SEQ ID NO: 12968 - DNA, 20 bp, Artificial Sequence
  Description of Artificial Sequence: Synthetic oligonucleotide
tcactgcaacctctgcctcc

SEQ ID NO: 12969 - DNA, 20 bp, Artificial Sequence
  Description of Artificial Sequence: Synthetic oligonucleotide
cactgcaacctctgcctccc

SEQ ID NO: 12970 - DNA, 20 bp, Artificial Sequence
  Description of Artificial Sequence: Synthetic oligonucleotide
actgcaacctctgcctcccg

SEQ ID NO: 12971 - DNA, 20 bp, Artificial Sequence
  Description of Artificial Sequence: Synthetic oligonucleotide
ctgcaacctctgcctcccgg

SEQ ID NO: 12972 - DNA, 20 bp, Artificial Sequence
  Description of Artificial Sequence: Synthetic oligonucleotide
tgcaacctctgcctcccggg

SEQ ID NO: 12973 - DNA, 20 bp, Artificial Sequence
  Description of Artificial Sequence: Synthetic oligonucleotide
gcaacctctgcctcccgggt

SEQ ID NO: 12974 - DNA, 20 bp, Artificial Sequence
  Description of Artificial Sequence: Synthetic oligonucleotide
caacctctgcctcccgggtt

SEQ ID NO: 12975 - DNA, 20 bp, Artificial Sequence
  Description of Artificial Sequence: Synthetic oligonucleotide
aacctctgcctcccgggttc

SEQ ID NO: 12976 - DNA, 20 bp, Artificial Sequence
  Description of Artificial Sequence: Synthetic oligonucleotide
acctctgcctcccgggttca

SEQ ID NO: 12977 - DNA, 20 bp, Artificial Sequence
  Description of Artificial Sequence: Synthetic oligonucleotide
cctctgcctcccgggttcaa

SEQ ID NO: 12978 - DNA, 20 bp, Artificial Sequence
  Description of Artificial Sequence: Synthetic oligonucleotide
ctctgcctcccgggttcaag

SEQ ID NO: 12979 - DNA, 20 bp, Artificial Sequence
  Description of Artificial Sequence: Synthetic oligonucleotide
tctgcctcccgggttcaaga

SEQ ID NO: 12980 - DNA, 20 bp, Artificial Sequence
  Description of Artificial Sequence: Synthetic oligonucleotide
ctgcctcccgggttcaagag

SEQ ID NO: 12981 - DNA, 20 bp, Artificial Sequence
  Description of Artificial Sequence: Synthetic oligonucleotide
tgcctcccgggttcaagaga

SEQ ID NO: 12982 - DNA, 20 bp, Artificial Sequence
  Description of Artificial Sequence: Synthetic oligonucleotide
gcctcccgggttcaagagat

SEQ ID NO: 12983 - DNA, 20 bp, Artificial Sequence
  Description of Artificial Sequence: Synthetic oligonucleotide
cctcccgggttcaagagatt

SEQ ID NO: 12984 - DNA, 20 bp, Artificial Sequence
  Description of Artificial Sequence: Synthetic oligonucleotide
ctcccgggttcaagagattc

SEQ ID NO: 12985 - DNA, 20 bp, Artificial Sequence
  Description of Artificial Sequence: Synthetic oligonucleotide
tcccgggttcaagagattct

SEQ ID NO: 12986 - DNA, 20 bp, Artificial Sequence
  Description of Artificial Sequence: Synthetic oligonucleotide
cccgggttcaagagattctc

SEQ ID NO: 12987 - DNA, 20 bp, Artificial Sequence
  Description of Artificial Sequence: Synthetic oligonucleotide
ccgggttcaagagattctcc

SEQ ID NO: 12988 - DNA, 20 bp, Artificial Sequence
  Description of Artificial Sequence: Synthetic oligonucleotide
cgggttcaagagattctcct

SEQ ID NO: 12989 - DNA, 20 bp, Artificial Sequence
  Description of Artificial Sequence: Synthetic oligonucleotide
gggttcaagagattctcctg

SEQ ID NO: 12990 - DNA, 20 bp, Artificial Sequence
  Description of Artificial Sequence: Synthetic oligonucleotide
ggttcaagagattctcctgc

SEQ ID NO: 12991 - DNA, 20 bp, Artificial Sequence
  Description of Artificial Sequence: Synthetic oligonucleotide
gttcaagagattctcctgcc

SEQ ID NO: 12992 - DNA, 20 bp, Artificial Sequence
  Description of Artificial Sequence: Synthetic oligonucleotide
ttcaagagattctcctgcct

SEQ ID NO: 12993 - DNA, 20 bp, Artificial Sequence
  Description of Artificial Sequence: Synthetic oligonucleotide
tcaagagattctcctgcctc

SEQ ID NO: 12994 - DNA, 20 bp, Artificial Sequence
  Description of Artificial Sequence: Synthetic oligonucleotide
caagagattctcctgcctca

SEQ ID NO: 12995 - DNA, 20 bp, Artificial Sequence
  Description of Artificial Sequence: Synthetic oligonucleotide
aagagattctcctgcctcag

SEQ ID NO: 12996 - DNA, 20 bp, Artificial Sequence
  Description of Artificial Sequence: Synthetic oligonucleotide
agagattctcctgcctcagc

SEQ ID NO: 12997 - DNA, 20 bp, Artificial Sequence
  Description of Artificial Sequence: Synthetic oligonucleotide
gagattctcctgcctcagcc

SEQ ID NO: 12998 - DNA, 20 bp, Artificial Sequence
  Description of Artificial Sequence: Synthetic oligonucleotide
agattctcctgcctcagcct

SEQ ID NO: 12999 - DNA, 20 bp, Artificial Sequence
  Description of Artificial Sequence: Synthetic oligonucleotide
gattctcctgcctcagcctc

SEQ ID NO: 13000 - DNA, 20 bp, Artificial Sequence
  Description of Artificial Sequence: Synthetic oligonucleotide
attctcctgcctcagcctcc

SEQ ID NO: 13001 - DNA, 20 bp, Artificial Sequence
  Description of Artificial Sequence: Synthetic oligonucleotide
ttctcctgcctcagcctccc

SEQ ID NO: 13002 - DNA, 20 bp, Artificial Sequence
  Description of Artificial Sequence: Synthetic oligonucleotide
tctcctgcctcagcctccca

SEQ ID NO: 13003 - DNA, 20 bp, Artificial Sequence
  Description of Artificial Sequence: Synthetic oligonucleotide
ctcctgcctcagcctcccaa

SEQ ID NO: 13004 - DNA, 20 bp, Artificial Sequence
  Description of Artificial Sequence: Synthetic oligonucleotide
tcctgcctcagcctcccaag

SEQ ID NO: 13005 - DNA, 20 bp, Artificial Sequence
  Description of Artificial Sequence: Synthetic oligonucleotide
cctgcctcagcctcccaagt

SEQ ID NO: 13006 - DNA, 20 bp, Artificial Sequence
  Description of Artificial Sequence: Synthetic oligonucleotide
ctgcctcagcctcccaagta

SEQ ID NO: 13007 - DNA, 20 bp, Artificial Sequence
  Description of Artificial Sequence: Synthetic oligonucleotide
tgcctcagcctcccaagtag

SEQ ID NO: 13008 - DNA, 20 bp, Artificial Sequence
  Description of Artificial Sequence: Synthetic oligonucleotide
gcctcagcctcccaagtagc

SEQ ID NO: 13009 - DNA, 20 bp, Artificial Sequence
  Description of Artificial Sequence: Synthetic oligonucleotide
cctcagcctcccaagtagct

SEQ ID NO: 13010 - DNA, 20 bp, Artificial Sequence
  Description of Artificial Sequence: Synthetic oligonucleotide
ctcagcctcccaagtagctg

SEQ ID NO: 13011 - DNA, 20 bp, Artificial Sequence
  Description of Artificial Sequence: Synthetic oligonucleotide
tcagcctcccaagtagctgg

SEQ ID NO: 13012 - DNA, 20 bp, Artificial Sequence
  Description of Artificial Sequence: Synthetic oligonucleotide
cagcctcccaagtagctggg

SEQ ID NO: 13013 - DNA, 20 bp, Artificial Sequence
  Description of Artificial Sequence: Synthetic oligonucleotide
agcctcccaagtagctggga

SEQ ID NO: 13014 - DNA, 20 bp, Artificial Sequence
  Description of Artificial Sequence: Synthetic oligonucleotide
gcctcccaagtagctgggat

SEQ ID NO: 13015 - DNA, 20 bp, Artificial Sequence
  Description of Artificial Sequence: Synthetic oligonucleotide
cctcccaagtagctgggatt

SEQ ID NO: 13016 - DNA, 20 bp, Artificial Sequence
  Description of Artificial Sequence: Synthetic oligonucleotide
ctcccaagtagctgggatta

SEQ ID NO: 13017 - DNA, 20 bp, Artificial Sequence
  Description of Artificial Sequence: Synthetic oligonucleotide
tcccaagtagctgggattac

SEQ ID NO: 13018 - DNA, 20 bp, Artificial Sequence
  Description of Artificial Sequence: Synthetic oligonucleotide
cccaagtagctgggattaca

SEQ ID NO: 13019 - DNA, 20 bp, Artificial Sequence
  Description of Artificial Sequence: Synthetic oligonucleotide
ccaagtagctgggattacag

SEQ ID NO: 13020 - DNA, 20 bp, Artificial Sequence
  Description of Artificial Sequence: Synthetic oligonucleotide
caagtagctgggattacagg

SEQ ID NO: 13021 - DNA, 20 bp, Artificial Sequence
  Description of Artificial Sequence: Synthetic oligonucleotide
aagtagctgggattacaggc

SEQ ID NO: 13022 - DNA, 20 bp, Artificial Sequence
  Description of Artificial Sequence: Synthetic oligonucleotide
agtagctgggattacaggca

SEQ ID NO: 13023 - DNA, 20 bp, Artificial Sequence
  Description of Artificial Sequence: Synthetic oligonucleotide
gtagctgggattacaggcat

SEQ ID NO: 13024 - DNA, 20 bp, Artificial Sequence
  Description of Artificial Sequence: Synthetic oligonucleotide
tagctgggattacaggcatg

SEQ ID NO: 13025 - DNA, 20 bp, Artificial Sequence
  Description of Artificial Sequence: Synthetic oligonucleotide
agctgggattacaggcatgc

SEQ ID NO: 13026 - DNA, 20 bp, Artificial Sequence
  Description of Artificial Sequence: Synthetic oligonucleotide
gctgggattacaggcatgca

SEQ ID NO: 13027 - DNA, 20 bp, Artificial Sequence
  Description of Artificial Sequence: Synthetic oligonucleotide
ctgggattacaggcatgcac

SEQ ID NO: 13028 - DNA, 20 bp, Artificial Sequence
  Description of Artificial Sequence: Synthetic oligonucleotide
tgggattacaggcatgcaca

SEQ ID NO: 13029 - DNA, 20 bp, Artificial Sequence
  Description of Artificial Sequence: Synthetic oligonucleotide
gggattacaggcatgcacac

SEQ ID NO: 13030 - DNA, 20 bp, Artificial Sequence
  Description of Artificial Sequence: Synthetic oligonucleotide
ggattacaggcatgcacacc

SEQ ID NO: 13031 - DNA, 20 bp, Artificial Sequence
  Description of Artificial Sequence: Synthetic oligonucleotide
gattacaggcatgcacacca

SEQ ID NO: 13032 - DNA, 20 bp, Artificial Sequence
  Description of Artificial Sequence: Synthetic oligonucleotide
attacaggcatgcacaccat

SEQ ID NO: 13033 - DNA, 20 bp, Artificial Sequence
  Description of Artificial Sequence: Synthetic oligonucleotide
ttacaggcatgcacaccatg

SEQ ID NO: 13034 - DNA, 20 bp, Artificial Sequence
  Description of Artificial Sequence: Synthetic oligonucleotide
tacaggcatgcacaccatgc

SEQ ID NO: 13035 - DNA, 20 bp, Artificial Sequence
  Description of Artificial Sequence: Synthetic oligonucleotide
acaggcatgcacaccatgcc

SEQ ID NO: 13036 - DNA, 20 bp, Artificial Sequence
  Description of Artificial Sequence: Synthetic oligonucleotide
caggcatgcacaccatgcca

SEQ ID NO: 13037 - DNA, 20 bp, Artificial Sequence
  Description of Artificial Sequence: Synthetic oligonucleotide
aggcatgcacaccatgccag

SEQ ID NO: 13038 - DNA, 20 bp, Artificial Sequence
  Description of Artificial Sequence: Synthetic oligonucleotide
ggcatgcacaccatgccagg

SEQ ID NO: 13039 - DNA, 20 bp, Artificial Sequence
  Description of Artificial Sequence: Synthetic oligonucleotide
gcatgcacaccatgccaggc

SEQ ID NO: 13040 - DNA, 20 bp, Artificial Sequence
  Description of Artificial Sequence: Synthetic oligonucleotide
catgcacaccatgccaggct

SEQ ID NO: 13041 - DNA, 20 bp, Artificial Sequence
  Description of Artificial Sequence: Synthetic oligonucleotide
atgcacaccatgccaggcta

SEQ ID NO: 13042 - DNA, 20 bp, Artificial Sequence
  Description of Artificial Sequence: Synthetic oligonucleotide
tgcacaccatgccaggctaa

SEQ ID NO: 13043 - DNA, 20 bp, Artificial Sequence
  Description of Artificial Sequence: Synthetic oligonucleotide
gcacaccatgccaggctaat

SEQ ID NO: 13044 - DNA, 20 bp, Artificial Sequence
  Description of Artificial Sequence: Synthetic oligonucleotide
cacaccatgccaggctaatt

SEQ ID NO: 13045 - DNA, 20 bp, Artificial Sequence
  Description of Artificial Sequence: Synthetic oligonucleotide
acaccatgccaggctaattt

SEQ ID NO: 13046 - DNA, 20 bp, Artificial Sequence
  Description of Artificial Sequence: Synthetic oligonucleotide
caccatgccaggctaatttt

SEQ ID NO: 13047 - DNA, 20 bp, Artificial Sequence
  Description of Artificial Sequence: Synthetic oligonucleotide
accatgccaggctaattttt

SEQ ID NO: 13048 - DNA, 20 bp, Artificial Sequence
  Description of Artificial Sequence: Synthetic oligonucleotide
ccatgccaggctaatttttt

SEQ ID NO: 13049 - DNA, 20 bp, Artificial Sequence
  Description of Artificial Sequence: Synthetic oligonucleotide
catgccaggctaattttttg

SEQ ID NO: 13050 - DNA, 20 bp, Artificial Sequence
  Description of Artificial Sequence: Synthetic oligonucleotide
atgccaggctaattttttgt

SEQ ID NO: 13051 - DNA, 20 bp, Artificial Sequence
  Description of Artificial Sequence: Synthetic oligonucleotide
tgccaggctaattttttgta

SEQ ID NO: 13052 - DNA, 20 bp, Artificial Sequence
  Description of Artificial Sequence: Synthetic oligonucleotide
gccaggctaattttttgtat

SEQ ID NO: 13053 - DNA, 20 bp, Artificial Sequence
  Description of Artificial Sequence: Synthetic oligonucleotide
ccaggctaattttttgtatt

SEQ ID NO: 13054 - DNA, 20 bp, Artificial Sequence
  Description of Artificial Sequence: Synthetic oligonucleotide
caggctaattttttgtattt

SEQ ID NO: 13055 - DNA, 20 bp, Artificial Sequence
  Description of Artificial Sequence: Synthetic oligonucleotide
aggctaattttttgtatttt

SEQ ID NO: 13056 - DNA, 20 bp, Artificial Sequence
  Description of Artificial Sequence: Synthetic oligonucleotide
ggctaattttttgtattttt

SEQ ID NO: 13057 - DNA, 20 bp, Artificial Sequence
  Description of Artificial Sequence: Synthetic oligonucleotide
gctaattttttgtattttta

SEQ ID NO: 13058 - DNA, 20 bp, Artificial Sequence
  Description of Artificial Sequence: Synthetic oligonucleotide
ctaattttttgtatttttag

SEQ ID NO: 13059 - DNA, 20 bp, Artificial Sequence
  Description of Artificial Sequence: Synthetic oligonucleotide
taattttttgtatttttagt

SEQ ID NO: 13060 - DNA, 20 bp, Artificial Sequence
  Description of Artificial Sequence: Synthetic oligonucleotide
aattttttgtatttttagta

SEQ ID NO: 13061 - DNA, 20 bp, Artificial Sequence
  Description of Artificial Sequence: Synthetic oligonucleotide
attttttgtatttttagtag

SEQ ID NO: 13062 - DNA, 20 bp, Artificial Sequence
  Description of Artificial Sequence: Synthetic oligonucleotide
ttttttgtatttttagtaga

SEQ ID NO: 13063 - DNA, 20 bp, Artificial Sequence
  Description of Artificial Sequence: Synthetic oligonucleotide
tttttgtatttttagtagag

SEQ ID NO: 13064 - DNA, 20 bp, Artificial Sequence
  Description of Artificial Sequence: Synthetic oligonucleotide
ttttgtatttttagtagaga

SEQ ID NO: 13065 - DNA, 20 bp, Artificial Sequence
  Description of Artificial Sequence: Synthetic oligonucleotide
tttgtatttttagtagagac

SEQ ID NO: 13066 - DNA, 20 bp, Artificial Sequence
  Description of Artificial Sequence: Synthetic oligonucleotide
ttgtatttttagtagagacg

SEQ ID NO: 13067 - DNA, 20 bp, Artificial Sequence
  Description of Artificial Sequence: Synthetic oligonucleotide
tgtatttttagtagagacga

SEQ ID NO: 13068 - DNA, 20 bp, Artificial Sequence
  Description of Artificial Sequence: Synthetic oligonucleotide
gtatttttagtagagacgag

SEQ ID NO: 13069 - DNA, 20 bp, Artificial Sequence
  Description of Artificial Sequence: Synthetic oligonucleotide
tatttttagtagagacgagg

SEQ ID NO: 13070 - DNA, 20 bp, Artificial Sequence
  Description of Artificial Sequence: Synthetic oligonucleotide
atttttagtagagacgaggt

SEQ ID NO: 13071 - DNA, 20 bp, Artificial Sequence
  Description of Artificial Sequence: Synthetic oligonucleotide
tttttagtagagacgaggtt

SEQ ID NO: 13072 - DNA, 20 bp, Artificial Sequence
  Description of Artificial Sequence: Synthetic oligonucleotide
ttttagtagagacgaggttt

SEQ ID NO: 13073 - DNA, 20 bp, Artificial Sequence
  Description of Artificial Sequence: Synthetic oligonucleotide
tttagtagagacgaggtttc

SEQ ID NO: 13074 - DNA, 20 bp, Artificial Sequence
  Description of Artificial Sequence: Synthetic oligonucleotide
ttagtagagacgaggtttct

SEQ ID NO: 13075 - DNA, 20 bp, Artificial Sequence
  Description of Artificial Sequence: Synthetic oligonucleotide
tagtagagacgaggtttctc

SEQ ID NO: 13076 - DNA, 20 bp, Artificial Sequence
  Description of Artificial Sequence: Synthetic oligonucleotide
agtagagacgaggtttctcc

SEQ ID NO: 13077 - DNA, 20 bp, Artificial Sequence
  Description of Artificial Sequence: Synthetic oligonucleotide
gtagagacgaggtttctcca

SEQ ID NO: 13078 - DNA, 20 bp, Artificial Sequence
  Description of Artificial Sequence: Synthetic oligonucleotide
tagagacgaggtttctccat

SEQ ID NO: 13079 - DNA, 20 bp, Artificial Sequence
  Description of Artificial Sequence: Synthetic oligonucleotide
agagacgaggtttctccatg

SEQ ID NO: 13080 - DNA, 20 bp, Artificial Sequence
  Description of Artificial Sequence: Synthetic oligonucleotide
gagacgaggtttctccatgt

SEQ ID NO: 13081 - DNA, 20 bp, Artificial Sequence
  Description of Artificial Sequence: Synthetic oligonucleotide
agacgaggtttctccatgtt

SEQ ID NO: 13082 - DNA, 20 bp, Artificial Sequence
  Description of Artificial Sequence: Synthetic oligonucleotide
gacgaggtttctccatgttg

SEQ ID NO: 13083 - DNA, 20 bp, Artificial Sequence
  Description of Artificial Sequence: Synthetic oligonucleotide
acgaggtttctccatgttgg

SEQ ID NO: 13084 - DNA, 20 bp, Artificial Sequence
  Description of Artificial Sequence: Synthetic oligonucleotide
cgaggtttctccatgttggc

SEQ ID NO: 13085 - DNA, 20 bp, Artificial Sequence
  Description of Artificial Sequence: Synthetic oligonucleotide
gaggtttctccatgttggcc

SEQ ID NO: 13086 - DNA, 20 bp, Artificial Sequence
  Description of Artificial Sequence: Synthetic oligonucleotide
aggtttctccatgttggcca

SEQ ID NO: 13087 - DNA, 20 bp, Artificial Sequence
  Description of Artificial Sequence: Synthetic oligonucleotide
ggtttctccatgttggccag

SEQ ID NO: 13088 - DNA, 20 bp, Artificial Sequence
  Description of Artificial Sequence: Synthetic oligonucleotide
gtttctccatgttggccagg

SEQ ID NO: 13089 - DNA, 20 bp, Artificial Sequence
  Description of Artificial Sequence: Synthetic oligonucleotide
tttctccatgttggccaggc

SEQ ID NO: 13090 - DNA, 20 bp, Artificial Sequence
  Description of Artificial Sequence: Synthetic oligonucleotide
ttctccatgttggccaggct

SEQ ID NO: 13091 - DNA, 20 bp, Artificial Sequence
  Description of Artificial Sequence: Synthetic oligonucleotide
tctccatgttggccaggcta

SEQ ID NO: 13092 - DNA, 20 bp, Artificial Sequence
  Description of Artificial Sequence: Synthetic oligonucleotide
ctccatgttggccaggctag

SEQ ID NO: 13093 - DNA, 20 bp, Artificial Sequence
  Description of Artificial Sequence: Synthetic oligonucleotide
tccatgttggccaggctagt

SEQ ID NO: 13094 - DNA, 20 bp, Artificial Sequence
  Description of Artificial Sequence: Synthetic oligonucleotide
ccatgttggccaggctagtc

SEQ ID NO: 13095 - DNA, 20 bp, Artificial Sequence
  Description of Artificial Sequence: Synthetic oligonucleotide
catgttggccaggctagtct

SEQ ID NO: 13096 - DNA, 20 bp, Artificial Sequence
  Description of Artificial Sequence: Synthetic oligonucleotide
atgttggccaggctagtctc

SEQ ID NO: 13097 - DNA, 20 bp, Artificial Sequence
  Description of Artificial Sequence: Synthetic oligonucleotide
tgttggccaggctagtctcg

SEQ ID NO: 13098 - DNA, 20 bp, Artificial Sequence
  Description of Artificial Sequence: Synthetic oligonucleotide
gttggccaggctagtctcga

SEQ ID NO: 13099 - DNA, 20 bp, Artificial Sequence
  Description of Artificial Sequence: Synthetic oligonucleotide
ttggccaggctagtctcgac

SEQ ID NO: 13100 - DNA, 20 bp, Artificial Sequence
  Description of Artificial Sequence: Synthetic oligonucleotide
tggccaggctagtctcgaca

SEQ ID NO: 13101 - DNA, 20 bp, Artificial Sequence
  Description of Artificial Sequence: Synthetic oligonucleotide
ggccaggctagtctcgacag

SEQ ID NO: 13102 - DNA, 20 bp, Artificial Sequence
  Description of Artificial Sequence: Synthetic oligonucleotide
gccaggctagtctcgacagc

SEQ ID NO: 13103 - DNA, 20 bp, Artificial Sequence
  Description of Artificial Sequence: Synthetic oligonucleotide
ccaggctagtctcgacagca

SEQ ID NO: 13104 - DNA, 20 bp, Artificial Sequence
  Description of Artificial Sequence: Synthetic oligonucleotide
caggctagtctcgacagcag

SEQ ID NO: 13105 - DNA, 20 bp, Artificial Sequence
  Description of Artificial Sequence: Synthetic oligonucleotide
aggctagtctcgacagcagg

SEQ ID NO: 13106 - DNA, 20 bp, Artificial Sequence
  Description of Artificial Sequence: Synthetic oligonucleotide
ggctagtctcgacagcaggt

SEQ ID NO: 13107 - DNA, 20 bp, Artificial Sequence
  Description of Artificial Sequence: Synthetic oligonucleotide
gctagtctcgacagcaggtg

SEQ ID NO: 13108 - DNA, 20 bp, Artificial Sequence
  Description of Artificial Sequence: Synthetic oligonucleotide
ctagtctcgacagcaggtgg

SEQ ID NO: 13109 - DNA, 20 bp, Artificial Sequence
  Description of Artificial Sequence: Synthetic oligonucleotide
tagtctcgacagcaggtgga

SEQ ID NO: 13110 - DNA, 20 bp, Artificial Sequence
  Description of Artificial Sequence: Synthetic oligonucleotide
agtctcgacagcaggtggag

SEQ ID NO: 13111 - DNA, 20 bp, Artificial Sequence
  Description of Artificial Sequence: Synthetic oligonucleotide
gtctcgacagcaggtggagg

SEQ ID NO: 13112 - DNA, 20 bp, Artificial Sequence
  Description of Artificial Sequence: Synthetic oligonucleotide
tctcgacagcaggtggaggc

SEQ ID NO: 13113 - DNA, 20 bp, Artificial Sequence
  Description of Artificial Sequence: Synthetic oligonucleotide
ctcgacagcaggtggaggct

SEQ ID NO: 13114 - DNA, 20 bp, Artificial Sequence
  Description of Artificial Sequence: Synthetic oligonucleotide
tcgacagcaggtggaggctc

SEQ ID NO: 13115 - DNA, 20 bp, Artificial Sequence
  Description of Artificial Sequence: Synthetic oligonucleotide
cgacagcaggtggaggctcc

SEQ ID NO: 13116 - DNA, 20 bp, Artificial Sequence
  Description of Artificial Sequence: Synthetic oligonucleotide
gacagcaggtggaggctccg

SEQ ID NO: 13117 - DNA, 20 bp, Artificial Sequence
  Description of Artificial Sequence: Synthetic oligonucleotide
acagcaggtggaggctccgt

SEQ ID NO: 13118 - DNA, 20 bp, Artificial Sequence
  Description of Artificial Sequence: Synthetic oligonucleotide
cagcaggtggaggctccgtg

SEQ ID NO: 13119 - DNA, 20 bp, Artificial Sequence
  Description of Artificial Sequence: Synthetic oligonucleotide
agcaggtggaggctccgtga

SEQ ID NO: 13120 - DNA, 20 bp, Artificial Sequence
  Description of Artificial Sequence: Synthetic oligonucleotide
gcaggtggaggctccgtgag

SEQ ID NO: 13121 - DNA, 20 bp, Artificial Sequence
  Description of Artificial Sequence: Synthetic oligonucleotide
caggtggaggctccgtgagc

SEQ ID NO: 13122 - DNA, 20 bp, Artificial Sequence
  Description of Artificial Sequence: Synthetic oligonucleotide
aggtggaggctccgtgagcc

SEQ ID NO: 13123 - DNA, 20 bp, Artificial Sequence
  Description of Artificial Sequence: Synthetic oligonucleotide
ggtggaggctccgtgagcca

SEQ ID NO: 13124 - DNA, 20 bp, Artificial Sequence
  Description of Artificial Sequence: Synthetic oligonucleotide
gtggaggctccgtgagccac

SEQ ID NO: 13125 - DNA, 20 bp, Artificial Sequence
  Description of Artificial Sequence: Synthetic oligonucleotide
tggaggctccgtgagccact

SEQ ID NO: 13126 - DNA, 20 bp, Artificial Sequence
  Description of Artificial Sequence: Synthetic oligonucleotide
ggaggctccgtgagccactg

SEQ ID NO: 13127 - DNA, 20 bp, Artificial Sequence
  Description of Artificial Sequence: Synthetic oligonucleotide
gaggctccgtgagccactgc

SEQ ID NO: 13128 - DNA, 20 bp, Artificial Sequence
  Description of Artificial Sequence: Synthetic oligonucleotide
aggctccgtgagccactgcg

SEQ ID NO: 13129 - DNA, 20 bp, Artificial Sequence
  Description of Artificial Sequence: Synthetic oligonucleotide
ggctccgtgagccactgcgc

SEQ ID NO: 13130 - DNA, 20 bp, Artificial Sequence
  Description of Artificial Sequence: Synthetic oligonucleotide
gctccgtgagccactgcgcc

SEQ ID NO: 13131 - DNA, 20 bp, Artificial Sequence
  Description of Artificial Sequence: Synthetic oligonucleotide
ctccgtgagccactgcgccc

SEQ ID NO: 13132 - DNA, 20 bp, Artificial Sequence
  Description of Artificial Sequence: Synthetic oligonucleotide
tccgtgagccactgcgcccg

SEQ ID NO: 13133 - DNA, 20 bp, Artificial Sequence
  Description of Artificial Sequence: Synthetic oligonucleotide
ccgtgagccactgcgcccgg

SEQ ID NO: 13134 - DNA, 20 bp, Artificial Sequence
  Description of Artificial Sequence: Synthetic oligonucleotide
cgtgagccactgcgcccggt

SEQ ID NO: 13135 - DNA, 20 bp, Artificial Sequence
  Description of Artificial Sequence: Synthetic oligonucleotide
gtgagccactgcgcccggtc

SEQ ID NO: 13136 - DNA, 20 bp, Artificial Sequence
  Description of Artificial Sequence: Synthetic oligonucleotide
tgagccactgcgcccggtcg

SEQ ID NO: 13137 - DNA, 20 bp, Artificial Sequence
  Description of Artificial Sequence: Synthetic oligonucleotide
gagccactgcgcccggtcgt

SEQ ID NO: 13138 - DNA, 20 bp, Artificial Sequence
  Description of Artificial Sequence: Synthetic oligonucleotide
agccactgcgcccggtcgtt

SEQ ID NO: 13139 - DNA, 20 bp, Artificial Sequence
  Description of Artificial Sequence: Synthetic oligonucleotide
gccactgcgcccggtcgttt

SEQ ID NO: 13140 - DNA, 20 bp, Artificial Sequence
  Description of Artificial Sequence: Synthetic oligonucleotide
ccactgcgcccggtcgtttt

SEQ ID NO: 13141 - DNA, 20 bp, Artificial Sequence
  Description of Artificial Sequence: Synthetic oligonucleotide
cactgcgcccggtcgttttt

SEQ ID NO: 13142 - DNA, 20 bp, Artificial Sequence
  Description of Artificial Sequence: Synthetic oligonucleotide
actgcgcccggtcgtttttt

SEQ ID NO: 13143 - DNA, 20 bp, Artificial Sequence
  Description of Artificial Sequence: Synthetic oligonucleotide
ctgcgcccggtcgtttttta

SEQ ID NO: 13144 - DNA, 20 bp, Artificial Sequence
  Description of Artificial Sequence: Synthetic oligonucleotide
tgcgcccggtcgttttttaa

SEQ ID NO: 13145 - DNA, 20 bp, Artificial Sequence
  Description of Artificial Sequence: Synthetic oligonucleotide
gcgcccggtcgttttttaat

SEQ ID NO: 13146 - DNA, 20 bp, Artificial Sequence
  Description of Artificial Sequence: Synthetic oligonucleotide
cgcccggtcgttttttaatt

SEQ ID NO: 13147 - DNA, 20 bp, Artificial Sequence
  Description of Artificial Sequence: Synthetic oligonucleotide
gcccggtcgttttttaattt

SEQ ID NO: 13148 - DNA, 20 bp, Artificial Sequence
  Description of Artificial Sequence: Synthetic oligonucleotide
cccggtcgttttttaatttt

SEQ ID NO: 13149 - DNA, 20 bp, Artificial Sequence
  Description of Artificial Sequence: Synthetic oligonucleotide
ccggtcgttttttaatttta

SEQ ID NO: 13150 - DNA, 20 bp, Artificial Sequence
  Description of Artificial Sequence: Synthetic oligonucleotide
cggtcgttttttaattttat

SEQ ID NO: 13151 - DNA, 20 bp, Artificial Sequence
  Description of Artificial Sequence: Synthetic oligonucleotide
ggtcgttttttaattttata

SEQ ID NO: 13152 - DNA, 20 bp, Artificial Sequence
  Description of Artificial Sequence: Synthetic oligonucleotide
gtcgttttttaattttatat

SEQ ID NO: 13153 - DNA, 20 bp, Artificial Sequence
  Description of Artificial Sequence: Synthetic oligonucleotide
tcgttttttaattttatatt

SEQ ID NO: 13154 - DNA, 20 bp, Artificial Sequence
  Description of Artificial Sequence: Synthetic oligonucleotide
cgttttttaattttatattt

SEQ ID NO: 13155 - DNA, 20 bp, Artificial Sequence
  Description of Artificial Sequence: Synthetic oligonucleotide
gttttttaattttatattta

SEQ ID NO: 13156 - DNA, 20 bp, Artificial Sequence
  Description of Artificial Sequence: Synthetic oligonucleotide
ttttttaattttatatttat

SEQ ID NO: 13157 - DNA, 20 bp, Artificial Sequence
  Description of Artificial Sequence: Synthetic oligonucleotide
tttttaattttatatttatt

SEQ ID NO: 13158 - DNA, 20 bp, Artificial Sequence
  Description of Artificial Sequence: Synthetic oligonucleotide
ttttaattttatatttattt

SEQ ID NO: 13159 - DNA, 20 bp, Artificial Sequence
  Description of Artificial Sequence: Synthetic oligonucleotide
tttaattttatatttatttt

SEQ ID NO: 13160 - DNA, 20 bp, Artificial Sequence
  Description of Artificial Sequence: Synthetic oligonucleotide
ttaattttatatttatttta

SEQ ID NO: 13161 - DNA, 20 bp, Artificial Sequence
  Description of Artificial Sequence: Synthetic oligonucleotide
taattttatatttattttat

SEQ ID NO: 13162 - DNA, 20 bp, Artificial Sequence
  Description of Artificial Sequence: Synthetic oligonucleotide
aattttatatttattttatt

SEQ ID NO: 13163 - DNA, 20 bp, Artificial Sequence
  Description of Artificial Sequence: Synthetic oligonucleotide
attttatatttattttattt

SEQ ID NO: 13164 - DNA, 20 bp, Artificial Sequence
  Description of Artificial Sequence: Synthetic oligonucleotide
ttttatatttattttatttt

SEQ ID NO: 13165 - DNA, 20 bp, Artificial Sequence
  Description of Artificial Sequence: Synthetic oligonucleotide
tttatatttattttatttta

SEQ ID NO: 13166 - DNA, 20 bp, Artificial Sequence
  Description of Artificial Sequence: Synthetic oligonucleotide
ttatatttattttattttat

SEQ ID NO: 13167 - DNA, 20 bp, Artificial Sequence
  Description of Artificial Sequence: Synthetic oligonucleotide
tatatttattttattttatt

SEQ ID NO: 13168 - DNA, 20 bp, Artificial Sequence
  Description of Artificial Sequence: Synthetic oligonucleotide
atatttattttattttattt

SEQ ID NO: 13169 - DNA, 20 bp, Artificial Sequence
  Description of Artificial Sequence: Synthetic oligonucleotide
tatttattttattttatttt

SEQ ID NO: 13170 - DNA, 20 bp, Artificial Sequence
  Description of Artificial Sequence: Synthetic oligonucleotide
atttattttattttatttta

SEQ ID NO: 13171 - DNA, 20 bp, Artificial Sequence
  Description of Artificial Sequence: Synthetic oligonucleotide
tttattttattttattttat

SEQ ID NO: 13172 - DNA, 20 bp, Artificial Sequence
  Description of Artificial Sequence: Synthetic oligonucleotide
ttattttattttattttatt

SEQ ID NO: 13173 - DNA, 20 bp, Artificial Sequence
  Description of Artificial Sequence: Synthetic oligonucleotide
tattttattttattttattt

SEQ ID NO: 13174 - DNA, 20 bp, Artificial Sequence
  Description of Artificial Sequence: Synthetic oligonucleotide
attttattttattttattta

SEQ ID NO: 13175 - DNA, 20 bp, Artificial Sequence
  Description of Artificial Sequence: Synthetic oligonucleotide
ttttattttattttatttat

SEQ ID NO: 13176 - DNA, 20 bp, Artificial Sequence
  Description of Artificial Sequence: Synthetic oligonucleotide
tttattttattttatttatt

SEQ ID NO: 13177 - DNA, 20 bp, Artificial Sequence
  Description of Artificial Sequence: Synthetic oligonucleotide
ttattttattttatttattt

SEQ ID NO: 13178 - DNA, 20 bp, Artificial Sequence
  Description of Artificial Sequence: Synthetic oligonucleotide
tattttattttatttatttt

SEQ ID NO: 13179 - DNA, 20 bp, Artificial Sequence
  Description of Artificial Sequence: Synthetic oligonucleotide
attttattttatttattttg

SEQ ID NO: 13180 - DNA, 20 bp, Artificial Sequence
  Description of Artificial Sequence: Synthetic oligonucleotide
ttttattttatttattttgt

SEQ ID NO: 13181 - DNA, 20 bp, Artificial Sequence
  Description of Artificial Sequence: Synthetic oligonucleotide
tttattttatttattttgtg

SEQ ID NO: 13182 - DNA, 20 bp, Artificial Sequence
  Description of Artificial Sequence: Synthetic oligonucleotide
ttattttatttattttgtgt

SEQ ID NO: 13183 - DNA, 20 bp, Artificial Sequence
  Description of Artificial Sequence: Synthetic oligonucleotide
tattttatttattttgtgtg

SEQ ID NO: 13184 - DNA, 20 bp, Artificial Sequence
  Description of Artificial Sequence: Synthetic oligonucleotide
attttatttattttgtgtgt

SEQ ID NO: 13185 - DNA, 20 bp, Artificial Sequence
  Description of Artificial Sequence: Synthetic oligonucleotide
ttttatttattttgtgtgtg

SEQ ID NO: 13186 - DNA, 20 bp, Artificial Sequence
  Description of Artificial Sequence: Synthetic oligonucleotide
tttatttattttgtgtgtgt

SEQ ID NO: 13187 - DNA, 20 bp, Artificial Sequence
  Description of Artificial Sequence: Synthetic oligonucleotide
ttatttattttgtgtgtgtg

SEQ ID NO: 13188 - DNA, 20 bp, Artificial Sequence
  Description of Artificial Sequence: Synthetic oligonucleotide
tatttattttgtgtgtgtgt

SEQ ID NO: 13189 - DNA, 20 bp, Artificial Sequence
  Description of Artificial Sequence: Synthetic oligonucleotide
atttattttgtgtgtgtgtg

SEQ ID NO: 13190 - DNA, 20 bp, Artificial Sequence
  Description of Artificial Sequence: Synthetic oligonucleotide
tttattttgtgtgtgtgtgt

SEQ ID NO: 13191 - DNA, 20 bp, Artificial Sequence
  Description of Artificial Sequence: Synthetic oligonucleotide
ttattttgtgtgtgtgtgtg

SEQ ID NO: 13192 - DNA, 20 bp, Artificial Sequence
  Description of Artificial Sequence: Synthetic oligonucleotide
tattttgtgtgtgtgtgtgt

SEQ ID NO: 13193 - DNA, 20 bp, Artificial Sequence
  Description of Artificial Sequence: Synthetic oligonucleotide
attttgtgtgtgtgtgtgtg

SEQ ID NO: 13194 - DNA, 20 bp, Artificial Sequence
  Description of Artificial Sequence: Synthetic oligonucleotide
ttttgtgtgtgtgtgtgtgt

SEQ ID NO: 13195 - DNA, 20 bp, Artificial Sequence
  Description of Artificial Sequence: Synthetic oligonucleotide
tttgtgtgtgtgtgtgtgtg

SEQ ID NO: 13196 - DNA, 20 bp, Artificial Sequence
  Description of Artificial Sequence: Synthetic oligonucleotide
ttgtgtgtgtgtgtgtgtgt

SEQ ID NO: 13197 - DNA, 20 bp, Artificial Sequence
  Description of Artificial Sequence: Synthetic oligonucleotide
tgtgtgtgtgtgtgtgtgtg

SEQ ID NO: 13198 - DNA, 20 bp, Artificial Sequence
  Description of Artificial Sequence: Synthetic oligonucleotide
gtgtgtgtgtgtgtgtgtgt

SEQ ID NO: 13199 - DNA, 20 bp, Artificial Sequence
  Description of Artificial Sequence: Synthetic oligonucleotide
tgtgtgtgtgtgtgtgtgtg

SEQ ID NO: 13200 - DNA, 20 bp, Artificial Sequence
  Description of Artificial Sequence: Synthetic oligonucleotide
gtgtgtgtgtgtgtgtgtgt

SEQ ID NO: 13201 - DNA, 20 bp, Artificial Sequence
  Description of Artificial Sequence: Synthetic oligonucleotide
tgtgtgtgtgtgtgtgtgta

SEQ ID NO: 13202 - DNA, 20 bp, Artificial Sequence
  Description of Artificial Sequence: Synthetic oligonucleotide
gtgtgtgtgtgtgtgtgtag

SEQ ID NO: 13203 - DNA, 20 bp, Artificial Sequence
  Description of Artificial Sequence: Synthetic oligonucleotide
tgtgtgtgtgtgtgtgtaga

SEQ ID NO: 13204 - DNA, 20 bp, Artificial Sequence
  Description of Artificial Sequence: Synthetic oligonucleotide
gtgtgtgtgtgtgtgtagaa

SEQ ID NO: 13205 - DNA, 20 bp, Artificial Sequence
  Description of Artificial Sequence: Synthetic oligonucleotide
tgtgtgtgtgtgtgtagaag

SEQ ID NO: 13206 - DNA, 20 bp, Artificial Sequence
  Description of Artificial Sequence: Synthetic oligonucleotide
gtgtgtgtgtgtgtagaaga

SEQ ID NO: 13207 - DNA, 20 bp, Artificial Sequence
  Description of Artificial Sequence: Synthetic oligonucleotide
tgtgtgtgtgtgtagaagag

SEQ ID NO: 13208 - DNA, 20 bp, Artificial Sequence
  Description of Artificial Sequence: Synthetic oligonucleotide
gtgtgtgtgtgtagaagaga

SEQ ID NO: 13209 - DNA, 20 bp, Artificial Sequence
  Description of Artificial Sequence: Synthetic oligonucleotide
tgtgtgtgtgtagaagagac

SEQ ID NO: 13210 - DNA, 20 bp, Artificial Sequence
  Description of Artificial Sequence: Synthetic oligonucleotide
gtgtgtgtgtagaagagacg

SEQ ID NO: 13211 - DNA, 20 bp, Artificial Sequence
  Description of Artificial Sequence: Synthetic oligonucleotide
tgtgtgtgtagaagagacgg

SEQ ID NO: 13212 - DNA, 20 bp, Artificial Sequence
  Description of Artificial Sequence: Synthetic oligonucleotide
gtgtgtgtagaagagacggg

SEQ ID NO: 13213 - DNA, 20 bp, Artificial Sequence
  Description of Artificial Sequence: Synthetic oligonucleotide
tgtgtgtagaagagacgggg

SEQ ID NO: 13214 - DNA, 20 bp, Artificial Sequence
  Description of Artificial Sequence: Synthetic oligonucleotide
gtgtgtagaagagacggggg

SEQ ID NO: 13215 - DNA, 20 bp, Artificial Sequence
  Description of Artificial Sequence: Synthetic oligonucleotide
tgtgtagaagagacgggggt

SEQ ID NO: 13216 - DNA, 20 bp, Artificial Sequence
  Description of Artificial Sequence: Synthetic oligonucleotide
gtgtagaagagacgggggtc

SEQ ID NO: 13217 - DNA, 20 bp, Artificial Sequence
  Description of Artificial Sequence: Synthetic oligonucleotide
tgtagaagagacgggggtct

SEQ ID NO: 13218 - DNA, 20 bp, Artificial Sequence
  Description of Artificial Sequence: Synthetic oligonucleotide
gtagaagagacgggggtctc

SEQ ID NO: 13219 - DNA, 20 bp, Artificial Sequence
  Description of Artificial Sequence: Synthetic oligonucleotide
tagaagagacgggggtctcg

SEQ ID NO: 13220 - DNA, 20 bp, Artificial Sequence
  Description of Artificial Sequence: Synthetic oligonucleotide
agaagagacgggggtctcgc

SEQ ID NO: 13221 - DNA, 20 bp, Artificial Sequence
  Description of Artificial Sequence: Synthetic oligonucleotide
gaagagacgggggtctcgct

SEQ ID NO: 13222 - DNA, 20 bp, Artificial Sequence
  Description of Artificial Sequence: Synthetic oligonucleotide
aagagacgggggtctcgcta

SEQ ID NO: 13223 - DNA, 20 bp, Artificial Sequence
  Description of Artificial Sequence: Synthetic oligonucleotide
agagacgggggtctcgctat

SEQ ID NO: 13224 - DNA, 20 bp, Artificial Sequence
  Description of Artificial Sequence: Synthetic oligonucleotide
gagacgggggtctcgctatt

SEQ ID NO: 13225 - DNA, 20 bp, Artificial Sequence
  Description of Artificial Sequence: Synthetic oligonucleotide
agacgggggtctcgctattt

SEQ ID NO: 13226 - DNA, 20 bp, Artificial Sequence
  Description of Artificial Sequence: Synthetic oligonucleotide
gacgggggtctcgctatttt

SEQ ID NO: 13227 - DNA, 20 bp, Artificial Sequence
  Description of Artificial Sequence: Synthetic oligonucleotide
acgggggtctcgctattttg

SEQ ID NO: 13228 - DNA, 20 bp, Artificial Sequence
  Description of Artificial Sequence: Synthetic oligonucleotide
cgggggtctcgctattttgc

SEQ ID NO: 13229 - DNA, 20 bp, Artificial Sequence
  Description of Artificial Sequence: Synthetic oligonucleotide
gggggtctcgctattttgct

SEQ ID NO: 13230 - DNA, 20 bp, Artificial Sequence
  Description of Artificial Sequence: Synthetic oligonucleotide
ggggtctcgctattttgctt

SEQ ID NO: 13231 - DNA, 20 bp, Artificial Sequence
  Description of Artificial Sequence: Synthetic oligonucleotide
gggtctcgctattttgcttt

SEQ ID NO: 13232 - DNA, 20 bp, Artificial Sequence
  Description of Artificial Sequence: Synthetic oligonucleotide
ggtctcgctattttgcttta

SEQ ID NO: 13233 - DNA, 20 bp, Artificial Sequence
  Description of Artificial Sequence: Synthetic oligonucleotide
gtctcgctattttgctttag

SEQ ID NO: 13234 - DNA, 20 bp, Artificial Sequence
  Description of Artificial Sequence: Synthetic oligonucleotide
tctcgctattttgctttagg

SEQ ID NO: 13235 - DNA, 20 bp, Artificial Sequence
  Description of Artificial Sequence: Synthetic oligonucleotide
ctcgctattttgctttaggt

SEQ ID NO: 13236 - DNA, 20 bp, Artificial Sequence
  Description of Artificial Sequence: Synthetic oligonucleotide
tcgctattttgctttaggtg

SEQ ID NO: 13237 - DNA, 20 bp, Artificial Sequence
  Description of Artificial Sequence: Synthetic oligonucleotide
cgctattttgctttaggtgg

SEQ ID NO: 13238 - DNA, 20 bp, Artificial Sequence
  Description of Artificial Sequence: Synthetic oligonucleotide
gctattttgctttaggtggt

SEQ ID NO: 13239 - DNA, 20 bp, Artificial Sequence
  Description of Artificial Sequence: Synthetic oligonucleotide
ctattttgctttaggtggtc

SEQ ID NO: 13240 - DNA, 20 bp, Artificial Sequence
  Description of Artificial Sequence: Synthetic oligonucleotide
tattttgctttaggtggtct

SEQ ID NO: 13241 - DNA, 20 bp, Artificial Sequence
  Description of Artificial Sequence: Synthetic oligonucleotide
attttgctttaggtggtctt

SEQ ID NO: 13242 - DNA, 20 bp, Artificial Sequence
  Description of Artificial Sequence: Synthetic oligonucleotide
ttttgctttaggtggtcttg

SEQ ID NO: 13243 - DNA, 20 bp, Artificial Sequence
  Description of Artificial Sequence: Synthetic oligonucleotide
tttgctttaggtggtcttga

SEQ ID NO: 13244 - DNA, 20 bp, Artificial Sequence
  Description of Artificial Sequence: Synthetic oligonucleotide
ttgctttaggtggtcttgaa

SEQ ID NO: 13245 - DNA, 20 bp, Artificial Sequence
  Description of Artificial Sequence: Synthetic oligonucleotide
tgctttaggtggtcttgaat

SEQ ID NO: 13246 - DNA, 20 bp, Artificial Sequence
  Description of Artificial Sequence: Synthetic oligonucleotide
gctttaggtggtcttgaatt

SEQ ID NO: 13247 - DNA, 20 bp, Artificial Sequence
  Description of Artificial Sequence: Synthetic oligonucleotide
ctttaggtggtcttgaattc

SEQ ID NO: 13248 - DNA, 20 bp, Artificial Sequence
  Description of Artificial Sequence: Synthetic oligonucleotide
tttaggtggtcttgaattcc

SEQ ID NO: 13249 - DNA, 20 bp, Artificial Sequence
  Description of Artificial Sequence: Synthetic oligonucleotide
ttaggtggtcttgaattcct

SEQ ID NO: 13250 - DNA, 20 bp, Artificial Sequence
  Description of Artificial Sequence: Synthetic oligonucleotide
taggtggtcttgaattcctg

SEQ ID NO: 13251 - DNA, 20 bp, Artificial Sequence
  Description of Artificial Sequence: Synthetic oligonucleotide
aggtggtcttgaattcctgg

SEQ ID NO: 13252 - DNA, 20 bp, Artificial Sequence
  Description of Artificial Sequence: Synthetic oligonucleotide
ggtggtcttgaattcctggc

SEQ ID NO: 13253 - DNA, 20 bp, Artificial Sequence
  Description of Artificial Sequence: Synthetic oligonucleotide
gtggtcttgaattcctggcc

SEQ ID NO: 13254 - DNA, 20 bp, Artificial Sequence
  Description of Artificial Sequence: Synthetic oligonucleotide
tggtcttgaattcctggcct

SEQ ID NO: 13255 - DNA, 20 bp, Artificial Sequence
  Description of Artificial Sequence: Synthetic oligonucleotide
ggtcttgaattcctggcctt

SEQ ID NO: 13256 - DNA, 20 bp, Artificial Sequence
  Description of Artificial Sequence: Synthetic oligonucleotide
gtcttgaattcctggccttg

SEQ ID NO: 13257 - DNA, 20 bp, Artificial Sequence
  Description of Artificial Sequence: Synthetic oligonucleotide
tcttgaattcctggccttga

SEQ ID NO: 13258 - DNA, 20 bp, Artificial Sequence
  Description of Artificial Sequence: Synthetic oligonucleotide
cttgaattcctggccttgag

SEQ ID NO: 13259 - DNA, 20 bp, Artificial Sequence
  Description of Artificial Sequence: Synthetic oligonucleotide
ttgaattcctggccttgagc

SEQ ID NO: 13260 - DNA, 20 bp, Artificial Sequence
  Description of Artificial Sequence: Synthetic oligonucleotide
tgaattcctggccttgagcg

SEQ ID NO: 13261 - DNA, 20 bp, Artificial Sequence
  Description of Artificial Sequence: Synthetic oligonucleotide
gaattcctggccttgagcga

SEQ ID NO: 13262 - DNA, 20 bp, Artificial Sequence
  Description of Artificial Sequence: Synthetic oligonucleotide
aattcctggccttgagcgaa

SEQ ID NO: 13263 - DNA, 20 bp, Artificial Sequence
  Description of Artificial Sequence: Synthetic oligonucleotide
attcctggccttgagcgaac

SEQ ID NO: 13264 - DNA, 20 bp, Artificial Sequence
  Description of Artificial Sequence: Synthetic oligonucleotide
ttcctggccttgagcgaacc

SEQ ID NO: 13265 - DNA, 20 bp, Artificial Sequence
  Description of Artificial Sequence: Synthetic oligonucleotide
tcctggccttgagcgaacct

SEQ ID NO: 13266 - DNA, 20 bp, Artificial Sequence
  Description of Artificial Sequence: Synthetic oligonucleotide
cctggccttgagcgaacctc

SEQ ID NO: 13267 - DNA, 20 bp, Artificial Sequence
  Description of Artificial Sequence: Synthetic oligonucleotide
ctggccttgagcgaacctcc

SEQ ID NO: 13268 - DNA, 20 bp, Artificial Sequence
  Description of Artificial Sequence: Synthetic oligonucleotide
tggccttgagcgaacctccc

SEQ ID NO: 13269 - DNA, 20 bp, Artificial Sequence
  Description of Artificial Sequence: Synthetic oligonucleotide
ggccttgagcgaacctccct

SEQ ID NO: 13270 - DNA, 20 bp, Artificial Sequence
  Description of Artificial Sequence: Synthetic oligonucleotide
gccttgagcgaacctccctc

SEQ ID NO: 13271 - DNA, 20 bp, Artificial Sequence
  Description of Artificial Sequence: Synthetic oligonucleotide
ccttgagcgaacctccctcc

SEQ ID NO: 13272 - DNA, 20 bp, Artificial Sequence
  Description of Artificial Sequence: Synthetic oligonucleotide
cttgagcgaacctccctcct

SEQ ID NO: 13273 - DNA, 20 bp, Artificial Sequence
  Description of Artificial Sequence: Synthetic oligonucleotide
ttgagcgaacctccctcctc

SEQ ID NO: 13274 - DNA, 20 bp, Artificial Sequence
  Description of Artificial Sequence: Synthetic oligonucleotide
tgagcgaacctccctcctcg

SEQ ID NO: 13275 - DNA, 20 bp, Artificial Sequence
  Description of Artificial Sequence: Synthetic oligonucleotide
gagcgaacctccctcctcgg

SEQ ID NO: 13276 - DNA, 20 bp, Artificial Sequence
  Description of Artificial Sequence: Synthetic oligonucleotide
agcgaacctccctcctcggc

SEQ ID NO: 13277 - DNA, 20 bp, Artificial Sequence
  Description of Artificial Sequence: Synthetic oligonucleotide
gcgaacctccctcctcggct

SEQ ID NO: 13278 - DNA, 20 bp, Artificial Sequence
  Description of Artificial Sequence: Synthetic oligonucleotide
cgaacctccctcctcggctt

SEQ ID NO: 13279 - DNA, 20 bp, Artificial Sequence
  Description of Artificial Sequence: Synthetic oligonucleotide
gaacctccctcctcggcttc

SEQ ID NO: 13280 - DNA, 20 bp, Artificial Sequence
  Description of Artificial Sequence: Synthetic oligonucleotide
aacctccctcctcggcttcc

SEQ ID NO: 13281 - DNA, 20 bp, Artificial Sequence
  Description of Artificial Sequence: Synthetic oligonucleotide
acctccctcctcggcttcct

SEQ ID NO: 13282 - DNA, 20 bp, Artificial Sequence
  Description of Artificial Sequence: Synthetic oligonucleotide
cctccctcctcggcttccta

SEQ ID NO: 13283 - DNA, 20 bp, Artificial Sequence
  Description of Artificial Sequence: Synthetic oligonucleotide
ctccctcctcggcttcctaa

SEQ ID NO: 13284 - DNA, 20 bp, Artificial Sequence
  Description of Artificial Sequence: Synthetic oligonucleotide
tccctcctcggcttcctaag

SEQ ID NO: 13285 - DNA, 20 bp, Artificial Sequence
  Description of Artificial Sequence: Synthetic oligonucleotide
ccctcctcggcttcctaagg

SEQ ID NO: 13286 - DNA, 20 bp, Artificial Sequence
  Description of Artificial Sequence: Synthetic oligonucleotide
cctcctcggcttcctaaggg

SEQ ID NO: 13287 - DNA, 20 bp, Artificial Sequence
  Description of Artificial Sequence: Synthetic oligonucleotide
ctcctcggcttcctaagggg

SEQ ID NO: 13288 - DNA, 20 bp, Artificial Sequence
  Description of Artificial Sequence: Synthetic oligonucleotide
tcctcggcttcctaaggggg

SEQ ID NO: 13289 - DNA, 20 bp, Artificial Sequence
  Description of Artificial Sequence: Synthetic oligonucleotide
cctcggcttcctaagggggg

SEQ ID NO: 13290 - DNA, 20 bp, Artificial Sequence
  Description of Artificial Sequence: Synthetic oligonucleotide
ctcggcttcctaagggggga

SEQ ID NO: 13291 - DNA, 20 bp, Artificial Sequence
  Description of Artificial Sequence: Synthetic oligonucleotide
tcggcttcctaaggggggag

SEQ ID NO: 13292 - DNA, 20 bp, Artificial Sequence
  Description of Artificial Sequence: Synthetic oligonucleotide
cggcttcctaaggggggagc

SEQ ID NO: 13293 - DNA, 20 bp, Artificial Sequence
  Description of Artificial Sequence: Synthetic oligonucleotide
ggcttcctaaggggggagcc

SEQ ID NO: 13294 - DNA, 20 bp, Artificial Sequence
  Description of Artificial Sequence: Synthetic oligonucleotide
gcttcctaaggggggagccc

SEQ ID NO: 13295 - DNA, 20 bp, Artificial Sequence
  Description of Artificial Sequence: Synthetic oligonucleotide
cttcctaaggggggagccca

SEQ ID NO: 13296 - DNA, 20 bp, Artificial Sequence
  Description of Artificial Sequence: Synthetic oligonucleotide
ttcctaaggggggagcccat

SEQ ID NO: 13297 - DNA, 20 bp, Artificial Sequence
  Description of Artificial Sequence: Synthetic oligonucleotide
tcctaaggggggagcccatc

SEQ ID NO: 13298 - DNA, 20 bp, Artificial Sequence
  Description of Artificial Sequence: Synthetic oligonucleotide
cctaaggggggagcccatcc

SEQ ID NO: 13299 - DNA, 20 bp, Artificial Sequence
  Description of Artificial Sequence: Synthetic oligonucleotide
ctaaggggggagcccatccc

SEQ ID NO: 13300 - DNA, 20 bp, Artificial Sequence
  Description of Artificial Sequence: Synthetic oligonucleotide
taaggggggagcccatccct

SEQ ID NO: 13301 - DNA, 20 bp, Artificial Sequence
  Description of Artificial Sequence: Synthetic oligonucleotide
aaggggggagcccatccctt

SEQ ID NO: 13302 - DNA, 20 bp, Artificial Sequence
  Description of Artificial Sequence: Synthetic oligonucleotide
aggggggagcccatcccttg

SEQ ID NO: 13303 - DNA, 20 bp, Artificial Sequence
  Description of Artificial Sequence: Synthetic oligonucleotide
ggggggagcccatcccttga

SEQ ID NO: 13304 - DNA, 20 bp, Artificial Sequence
  Description of Artificial Sequence: Synthetic oligonucleotide
gggggagcccatcccttgac

SEQ ID NO: 13305 - DNA, 20 bp, Artificial Sequence
  Description of Artificial Sequence: Synthetic oligonucleotide
ggggagcccatcccttgacg

SEQ ID NO: 13306 - DNA, 20 bp, Artificial Sequence
  Description of Artificial Sequence: Synthetic oligonucleotide
gggagcccatcccttgacgc

SEQ ID NO: 13307 - DNA, 20 bp, Artificial Sequence
  Description of Artificial Sequence: Synthetic oligonucleotide
ggagcccatcccttgacgca

SEQ ID NO: 13308 - DNA, 20 bp, Artificial Sequence
  Description of Artificial Sequence: Synthetic oligonucleotide
gagcccatcccttgacgcag

SEQ ID NO: 13309 - DNA, 20 bp, Artificial Sequence
  Description of Artificial Sequence: Synthetic oligonucleotide
agcccatcccttgacgcagg

SEQ ID NO: 13310 - DNA, 20 bp, Artificial Sequence
  Description of Artificial Sequence: Synthetic oligonucleotide
gcccatcccttgacgcaggg

SEQ ID NO: 13311 - DNA, 20 bp, Artificial Sequence
  Description of Artificial Sequence: Synthetic oligonucleotide
cccatcccttgacgcaggga

SEQ ID NO: 13312 - DNA, 20 bp, Artificial Sequence
  Description of Artificial Sequence: Synthetic oligonucleotide
ccatcccttgacgcagggaa

SEQ ID NO: 13313 - DNA, 20 bp, Artificial Sequence
  Description of Artificial Sequence: Synthetic oligonucleotide
catcccttgacgcagggaag

SEQ ID NO: 13314 - DNA, 20 bp, Artificial Sequence
  Description of Artificial Sequence: Synthetic oligonucleotide
atcccttgacgcagggaagc

SEQ ID NO: 13315 - DNA, 20 bp, Artificial Sequence
  Description of Artificial Sequence: Synthetic oligonucleotide
tcccttgacgcagggaagcc

SEQ ID NO: 13316 - DNA, 20 bp, Artificial Sequence
  Description of Artificial Sequence: Synthetic oligonucleotide
cccttgacgcagggaagccc

SEQ ID NO: 13317 - DNA, 20 bp, Artificial Sequence
  Description of Artificial Sequence: Synthetic oligonucleotide
ccttgacgcagggaagccca

SEQ ID NO: 13318 - DNA, 20 bp, Artificial Sequence
  Description of Artificial Sequence: Synthetic oligonucleotide
cttgacgcagggaagcccag

SEQ ID NO: 13319 - DNA, 20 bp, Artificial Sequence
  Description of Artificial Sequence: Synthetic oligonucleotide
ttgacgcagggaagcccagg

SEQ ID NO: 13320 - DNA, 20 bp, Artificial Sequence
  Description of Artificial Sequence: Synthetic oligonucleotide
tgacgcagggaagcccaggg

SEQ ID NO: 13321 - DNA, 20 bp, Artificial Sequence
  Description of Artificial Sequence: Synthetic oligonucleotide
gacgcagggaagcccaggga

SEQ ID NO: 13322 - DNA, 20 bp, Artificial Sequence
  Description of Artificial Sequence: Synthetic oligonucleotide
acgcagggaagcccagggag

SEQ ID NO: 13323 - DNA, 20 bp, Artificial Sequence
  Description of Artificial Sequence: Synthetic oligonucleotide
cgcagggaagcccagggagc

SEQ ID NO: 13324 - DNA, 20 bp, Artificial Sequence
  Description of Artificial Sequence: Synthetic oligonucleotide
gcagggaagcccagggagcc

SEQ ID NO: 13325 - DNA, 20 bp, Artificial Sequence
  Description of Artificial Sequence: Synthetic oligonucleotide
cagggaagcccagggagcca

SEQ ID NO: 13326 - DNA, 20 bp, Artificial Sequence
  Description of Artificial Sequence: Synthetic oligonucleotide
agggaagcccagggagccac

SEQ ID NO: 13327 - DNA, 20 bp, Artificial Sequence
  Description of Artificial Sequence: Synthetic oligonucleotide
gggaagcccagggagccaca

SEQ ID NO: 13328 - DNA, 20 bp, Artificial Sequence
  Description of Artificial Sequence: Synthetic oligonucleotide
ggaagcccagggagccacag

SEQ ID NO: 13329 - DNA, 20 bp, Artificial Sequence
  Description of Artificial Sequence: Synthetic oligonucleotide
gaagcccagggagccacagt

SEQ ID NO: 13330 - DNA, 20 bp, Artificial Sequence
  Description of Artificial Sequence: Synthetic oligonucleotide
aagcccagggagccacagtt

SEQ ID NO: 13331 - DNA, 20 bp, Artificial Sequence
  Description of Artificial Sequence: Synthetic oligonucleotide
agcccagggagccacagttg

SEQ ID NO: 13332 - DNA, 20 bp, Artificial Sequence
  Description of Artificial Sequence: Synthetic oligonucleotide
gcccagggagccacagttgc

SEQ ID NO: 13333 - DNA, 20 bp, Artificial Sequence
  Description of Artificial Sequence: Synthetic oligonucleotide
cccagggagccacagttgcg

SEQ ID NO: 13334 - DNA, 20 bp, Artificial Sequence
  Description of Artificial Sequence: Synthetic oligonucleotide
ccagggagccacagttgcgc

SEQ ID NO: 13335 - DNA, 20 bp, Artificial Sequence
  Description of Artificial Sequence: Synthetic oligonucleotide
cagggagccacagttgcgca

SEQ ID NO: 13336 - DNA, 20 bp, Artificial Sequence
  Description of Artificial Sequence: Synthetic oligonucleotide
agggagccacagttgcgcac

SEQ ID NO: 13337 - DNA, 20 bp, Artificial Sequence
  Description of Artificial Sequence: Synthetic oligonucleotide
gggagccacagttgcgcacc

SEQ ID NO: 13338 - DNA, 20 bp, Artificial Sequence
  Description of Artificial Sequence: Synthetic oligonucleotide
ggagccacagttgcgcaccc

SEQ ID NO: 13339 - DNA, 20 bp, Artificial Sequence
  Description of Artificial Sequence: Synthetic oligonucleotide
gagccacagttgcgcacccc

SEQ ID NO: 13340 - DNA, 20 bp, Artificial Sequence
  Description of Artificial Sequence: Synthetic oligonucleotide
agccacagttgcgcaccccg

SEQ ID NO: 13341 - DNA, 20 bp, Artificial Sequence
  Description of Artificial Sequence: Synthetic oligonucleotide
gccacagttgcgcaccccgc

SEQ ID NO: 13342 - DNA, 20 bp, Artificial Sequence
  Description of Artificial Sequence: Synthetic oligonucleotide
ccacagttgcgcaccccgcc

SEQ ID NO: 13343 - DNA, 20 bp, Artificial Sequence
  Description of Artificial Sequence: Synthetic oligonucleotide
cacagttgcgcaccccgccc

SEQ ID NO: 13344 - DNA, 20 bp, Artificial Sequence
  Description of Artificial Sequence: Synthetic oligonucleotide
acagttgcgcaccccgcccc

SEQ ID NO: 13345 - DNA, 20 bp, Artificial Sequence
  Description of Artificial Sequence: Synthetic oligonucleotide
cagttgcgcaccccgccccc

SEQ ID NO: 13346 - DNA, 20 bp, Artificial Sequence
  Description of Artificial Sequence: Synthetic oligonucleotide
agttgcgcaccccgccccca

SEQ ID NO: 13347 - DNA, 20 bp, Artificial Sequence
  Description of Artificial Sequence: Synthetic oligonucleotide
gttgcgcaccccgcccccac

SEQ ID NO: 13348 - DNA, 20 bp, Artificial Sequence
  Description of Artificial Sequence: Synthetic oligonucleotide
ttgcgcaccccgcccccacg

SEQ ID NO: 13349 - DNA, 20 bp, Artificial Sequence
  Description of Artificial Sequence: Synthetic oligonucleotide
tgcgcaccccgcccccacgc

SEQ ID NO: 13350 - DNA, 20 bp, Artificial Sequence
  Description of Artificial Sequence: Synthetic oligonucleotide
gcgcaccccgcccccacgcc

SEQ ID NO: 13351 - DNA, 20 bp, Artificial Sequence
  Description of Artificial Sequence: Synthetic oligonucleotide
cgcaccccgcccccacgccc

SEQ ID NO: 13352 - DNA, 20 bp, Artificial Sequence
  Description of Artificial Sequence: Synthetic oligonucleotide
gcaccccgcccccacgcccc

SEQ ID NO: 13353 - DNA, 20 bp, Artificial Sequence
  Description of Artificial Sequence: Synthetic oligonucleotide
caccccgcccccacgcccca

SEQ ID NO: 13354 - DNA, 20 bp, Artificial Sequence
  Description of Artificial Sequence: Synthetic oligonucleotide
accccgcccccacgccccac

SEQ ID NO: 13355 - DNA, 20 bp, Artificial Sequence
  Description of Artificial Sequence: Synthetic oligonucleotide
ccccgcccccacgccccact

SEQ ID NO: 13356 - DNA, 20 bp, Artificial Sequence
  Description of Artificial Sequence: Synthetic oligonucleotide
cccgcccccacgccccactc

SEQ ID NO: 13357 - DNA, 20 bp, Artificial Sequence
  Description of Artificial Sequence: Synthetic oligonucleotide
ccgcccccacgccccactcc

SEQ ID NO: 13358 - DNA, 20 bp, Artificial Sequence
  Description of Artificial Sequence: Synthetic oligonucleotide
cgcccccacgccccactcct

SEQ ID NO: 13359 - DNA, 20 bp, Artificial Sequence
  Description of Artificial Sequence: Synthetic oligonucleotide
gcccccacgccccactcctg

SEQ ID NO: 13360 - DNA, 20 bp, Artificial Sequence
  Description of Artificial Sequence: Synthetic oligonucleotide
cccccacgccccactcctgt

SEQ ID NO: 13361 - DNA, 20 bp, Artificial Sequence
  Description of Artificial Sequence: Synthetic oligonucleotide
ccccacgccccactcctgtc

SEQ ID NO: 13362 - DNA, 20 bp, Artificial Sequence
  Description of Artificial Sequence: Synthetic oligonucleotide
cccacgccccactcctgtcc

SEQ ID NO: 13363 - DNA, 20 bp, Artificial Sequence
  Description of Artificial Sequence: Synthetic oligonucleotide
ccacgccccactcctgtcca

SEQ ID NO: 13364 - DNA, 20 bp, Artificial Sequence
  Description of Artificial Sequence: Synthetic oligonucleotide
cacgccccactcctgtccat

SEQ ID NO: 13365 - DNA, 20 bp, Artificial Sequence
  Description of Artificial Sequence: Synthetic oligonucleotide
acgccccactcctgtccata

SEQ ID NO: 13366 - DNA, 20 bp, Artificial Sequence
  Description of Artificial Sequence: Synthetic oligonucleotide
cgccccactcctgtccatac

SEQ ID NO: 13367 - DNA, 20 bp, Artificial Sequence
  Description of Artificial Sequence: Synthetic oligonucleotide
gccccactcctgtccatacc

SEQ ID NO: 13368 - DNA, 20 bp, Artificial Sequence
  Description of Artificial Sequence: Synthetic oligonucleotide
ccccactcctgtccataccc

SEQ ID NO: 13369 - DNA, 20 bp, Artificial Sequence
  Description of Artificial Sequence: Synthetic oligonucleotide
cccactcctgtccataccct

SEQ ID NO: 13370 - DNA, 20 bp, Artificial Sequence
  Description of Artificial Sequence: Synthetic oligonucleotide
ccactcctgtccataccctt

SEQ ID NO: 13371 - DNA, 20 bp, Artificial Sequence
  Description of Artificial Sequence: Synthetic oligonucleotide
cactcctgtccatacccttc

SEQ ID NO: 13372 - DNA, 20 bp, Artificial Sequence
  Description of Artificial Sequence: Synthetic oligonucleotide
actcctgtccatacccttcc

SEQ ID NO: 13373 - DNA, 20 bp, Artificial Sequence
  Description of Artificial Sequence: Synthetic oligonucleotide
ctcctgtccatacccttcca

SEQ ID NO: 13374 - DNA, 20 bp, Artificial Sequence
  Description of Artificial Sequence: Synthetic oligonucleotide
tcctgtccatacccttccaa

SEQ ID NO: 13375 - DNA, 20 bp, Artificial Sequence
  Description of Artificial Sequence: Synthetic oligonucleotide
cctgtccatacccttccaag

SEQ ID NO: 13376 - DNA, 20 bp, Artificial Sequence
  Description of Artificial Sequence: Synthetic oligonucleotide
ctgtccatacccttccaagc

SEQ ID NO: 13377 - DNA, 20 bp, Artificial Sequence
  Description of Artificial Sequence: Synthetic oligonucleotide
tgtccatacccttccaagcc

SEQ ID NO: 13378 - DNA, 20 bp, Artificial Sequence
  Description of Artificial Sequence: Synthetic oligonucleotide
gtccatacccttccaagcca

SEQ ID NO: 13379 - DNA, 20 bp, Artificial Sequence
  Description of Artificial Sequence: Synthetic oligonucleotide
tccatacccttccaagccag

SEQ ID NO: 13380 - DNA, 20 bp, Artificial Sequence
  Description of Artificial Sequence: Synthetic oligonucleotide
ccatacccttccaagccagg

SEQ ID NO: 13381 - DNA, 20 bp, Artificial Sequence
  Description of Artificial Sequence: Synthetic oligonucleotide
catacccttccaagccagga

SEQ ID NO: 13382 - DNA, 20 bp, Artificial Sequence
  Description of Artificial Sequence: Synthetic oligonucleotide
atacccttccaagccaggag

SEQ ID NO: 13383 - DNA, 20 bp, Artificial Sequence
  Description of Artificial Sequence: Synthetic oligonucleotide
tacccttccaagccaggaga

SEQ ID NO: 13384 - DNA, 20 bp, Artificial Sequence
  Description of Artificial Sequence: Synthetic oligonucleotide
acccttccaagccaggagag

SEQ ID NO: 13385 - DNA, 20 bp, Artificial Sequence
  Description of Artificial Sequence: Synthetic oligonucleotide
cccttccaagccaggagagc

SEQ ID NO: 13386 - DNA, 20 bp, Artificial Sequence
  Description of Artificial Sequence: Synthetic oligonucleotide
ccttccaagccaggagagcc

SEQ ID NO: 13387 - DNA, 20 bp, Artificial Sequence
  Description of Artificial Sequence: Synthetic oligonucleotide
cttccaagccaggagagcca

SEQ ID NO: 13388 - DNA, 20 bp, Artificial Sequence
  Description of Artificial Sequence: Synthetic oligonucleotide
ttccaagccaggagagccac

SEQ ID NO: 13389 - DNA, 20 bp, Artificial Sequence
  Description of Artificial Sequence: Synthetic oligonucleotide
tccaagccaggagagccact

SEQ ID NO: 13390 - DNA, 20 bp, Artificial Sequence
  Description of Artificial Sequence: Synthetic oligonucleotide
ccaagccaggagagccacta

SEQ ID NO: 13391 - DNA, 20 bp, Artificial Sequence
  Description of Artificial Sequence: Synthetic oligonucleotide
caagccaggagagccactag

SEQ ID NO: 13392 - DNA, 20 bp, Artificial Sequence
  Description of Artificial Sequence: Synthetic oligonucleotide
aagccaggagagccactagg

SEQ ID NO: 13393 - DNA, 20 bp, Artificial Sequence
  Description of Artificial Sequence: Synthetic oligonucleotide
agccaggagagccactaggg

SEQ ID NO: 13394 - DNA, 20 bp, Artificial Sequence
  Description of Artificial Sequence: Synthetic oligonucleotide
gccaggagagccactagggg

SEQ ID NO: 13395 - DNA, 20 bp, Artificial Sequence
  Description of Artificial Sequence: Synthetic oligonucleotide
ccaggagagccactaggggc

SEQ ID NO: 13396 - DNA, 20 bp, Artificial Sequence
  Description of Artificial Sequence: Synthetic oligonucleotide
caggagagccactaggggcg

SEQ ID NO: 13397 - DNA, 20 bp, Artificial Sequence
  Description of Artificial Sequence: Synthetic oligonucleotide
aggagagccactaggggcgc

SEQ ID NO: 13398 - DNA, 20 bp, Artificial Sequence
  Description of Artificial Sequence: Synthetic oligonucleotide
ggagagccactaggggcgcg

SEQ ID NO: 13399 - DNA, 20 bp, Artificial Sequence
  Description of Artificial Sequence: Synthetic oligonucleotide
gagagccactaggggcgcgg

SEQ ID NO: 13400 - DNA, 20 bp, Artificial Sequence
  Description of Artificial Sequence: Synthetic oligonucleotide
agagccactaggggcgcgga

SEQ ID NO: 13401 - DNA, 20 bp, Artificial Sequence
  Description of Artificial Sequence: Synthetic oligonucleotide
gagccactaggggcgcggag

SEQ ID NO: 13402 - DNA, 20 bp, Artificial Sequence
  Description of Artificial Sequence: Synthetic oligonucleotide
agccactaggggcgcggaga

SEQ ID NO: 13403 - DNA, 20 bp, Artificial Sequence
  Description of Artificial Sequence: Synthetic oligonucleotide
gccactaggggcgcggagaa

SEQ ID NO: 13404 - DNA, 20 bp, Artificial Sequence
  Description of Artificial Sequence: Synthetic oligonucleotide
ccactaggggcgcggagaac

SEQ ID NO: 13405 - DNA, 20 bp, Artificial Sequence
  Description of Artificial Sequence: Synthetic oligonucleotide
cactaggggcgcggagaacc

SEQ ID NO: 13406 - DNA, 20 bp, Artificial Sequence
  Description of Artificial Sequence: Synthetic oligonucleotide
actaggggcgcggagaacca

SEQ ID NO: 13407 - DNA, 20 bp, Artificial Sequence
  Description of Artificial Sequence: Synthetic oligonucleotide
ctaggggcgcggagaaccag

SEQ ID NO: 13408 - DNA, 20 bp, Artificial Sequence
  Description of Artificial Sequence: Synthetic oligonucleotide
taggggcgcggagaaccagc

SEQ ID NO: 13409 - DNA, 20 bp, Artificial Sequence
  Description of Artificial Sequence: Synthetic oligonucleotide
aggggcgcggagaaccagcc

SEQ ID NO: 13410 - DNA, 20 bp, Artificial Sequence
  Description of Artificial Sequence: Synthetic oligonucleotide
ggggcgcggagaaccagccc

SEQ ID NO: 13411 - DNA, 20 bp, Artificial Sequence
  Description of Artificial Sequence: Synthetic oligonucleotide
gggcgcggagaaccagccct

SEQ ID NO: 13412 - DNA, 20 bp, Artificial Sequence
  Description of Artificial Sequence: Synthetic oligonucleotide
ggcgcggagaaccagccctg

SEQ ID NO: 13413 - DNA, 20 bp, Artificial Sequence
  Description of Artificial Sequence: Synthetic oligonucleotide
gcgcggagaaccagccctgg

SEQ ID NO: 13414 - DNA, 20 bp, Artificial Sequence
  Description of Artificial Sequence: Synthetic oligonucleotide
cgcggagaaccagccctggg

SEQ ID NO: 13415 - DNA, 20 bp, Artificial Sequence
  Description of Artificial Sequence: Synthetic oligonucleotide
gcggagaaccagccctgggg

SEQ ID NO: 13416 - DNA, 20 bp, Artificial Sequence
  Description of Artificial Sequence: Synthetic oligonucleotide
cggagaaccagccctgggga

SEQ ID NO: 13417 - DNA, 20 bp, Artificial Sequence
  Description of Artificial Sequence: Synthetic oligonucleotide
ggagaaccagccctggggac

SEQ ID NO: 13418 - DNA, 20 bp, Artificial Sequence
  Description of Artificial Sequence: Synthetic oligonucleotide
gagaaccagccctggggaca

SEQ ID NO: 13419 - DNA, 20 bp, Artificial Sequence
  Description of Artificial Sequence: Synthetic oligonucleotide
agaaccagccctggggacac

SEQ ID NO: 13420 - DNA, 20 bp, Artificial Sequence
  Description of Artificial Sequence: Synthetic oligonucleotide
gaaccagccctggggacacg

SEQ ID NO: 13421 - DNA, 20 bp, Artificial Sequence
  Description of Artificial Sequence: Synthetic oligonucleotide
aaccagccctggggacacgt

SEQ ID NO: 13422 - DNA, 20 bp, Artificial Sequence
  Description of Artificial Sequence: Synthetic oligonucleotide
accagccctggggacacgta

SEQ ID NO: 13423 - DNA, 20 bp, Artificial Sequence
  Description of Artificial Sequence: Synthetic oligonucleotide
ccagccctggggacacgtac

SEQ ID NO: 13424 - DNA, 20 bp, Artificial Sequence
  Description of Artificial Sequence: Synthetic oligonucleotide
cagccctggggacacgtacc

SEQ ID NO: 13425 - DNA, 20 bp, Artificial Sequence
  Description of Artificial Sequence: Synthetic oligonucleotide
agccctggggacacgtacct

SEQ ID NO: 13426 - DNA, 20 bp, Artificial Sequence
  Description of Artificial Sequence: Synthetic oligonucleotide
gccctggggacacgtacctg

SEQ ID NO: 13427 - DNA, 20 bp, Artificial Sequence
  Description of Artificial Sequence: Synthetic oligonucleotide
ccctggggacacgtacctgc

SEQ ID NO: 13428 - DNA, 20 bp, Artificial Sequence
  Description of Artificial Sequence: Synthetic oligonucleotide
cctggggacacgtacctgca

SEQ ID NO: 13429 - DNA, 20 bp, Artificial Sequence
  Description of Artificial Sequence: Synthetic oligonucleotide
ctggggacacgtacctgcag

SEQ ID NO: 13430 - DNA, 20 bp, Artificial Sequence
  Description of Artificial Sequence: Synthetic oligonucleotide
tggggacacgtacctgcagg

SEQ ID NO: 13431 - DNA, 20 bp, Artificial Sequence
  Description of Artificial Sequence: Synthetic oligonucleotide
ggggacacgtacctgcaggc

SEQ ID NO: 13432 - DNA, 20 bp, Artificial Sequence
  Description of Artificial Sequence: Synthetic oligonucleotide
gggacacgtacctgcaggct

SEQ ID NO: 13433 - DNA, 20 bp, Artificial Sequence
  Description of Artificial Sequence: Synthetic oligonucleotide
ggacacgtacctgcaggctg

SEQ ID NO: 13434 - DNA, 20 bp, Artificial Sequence
  Description of Artificial Sequence: Synthetic oligonucleotide
gacacgtacctgcaggctgt

SEQ ID NO: 13435 - DNA, 20 bp, Artificial Sequence
  Description of Artificial Sequence: Synthetic oligonucleotide
acacgtacctgcaggctgtg

SEQ ID NO: 13436 - DNA, 20 bp, Artificial Sequence
  Description of Artificial Sequence: Synthetic oligonucleotide
cacgtacctgcaggctgtga

SEQ ID NO: 13437 - DNA, 20 bp, Artificial Sequence
  Description of Artificial Sequence: Synthetic oligonucleotide
acgtacctgcaggctgtgaa

SEQ ID NO: 13438 - DNA, 20 bp, Artificial Sequence
  Description of Artificial Sequence: Synthetic oligonucleotide
cgtacctgcaggctgtgaag

SEQ ID NO: 13439 - DNA, 20 bp, Artificial Sequence
  Description of Artificial Sequence: Synthetic oligonucleotide
gtacctgcaggctgtgaagg

SEQ ID NO: 13440 - DNA, 20 bp, Artificial Sequence
  Description of Artificial Sequence: Synthetic oligonucleotide
tacctgcaggctgtgaagga

SEQ ID NO: 13441 - DNA, 20 bp, Artificial Sequence
  Description of Artificial Sequence: Synthetic oligonucleotide
acctgcaggctgtgaaggac

SEQ ID NO: 13442 - DNA, 20 bp, Artificial Sequence
  Description of Artificial Sequence: Synthetic oligonucleotide
cctgcaggctgtgaaggacc

SEQ ID NO: 13443 - DNA, 20 bp, Artificial Sequence
  Description of Artificial Sequence: Synthetic oligonucleotide
ctgcaggctgtgaaggacct

SEQ ID NO: 13444 - DNA, 20 bp, Artificial Sequence
  Description of Artificial Sequence: Synthetic oligonucleotide
tgcaggctgtgaaggacctc

SEQ ID NO: 13445 - DNA, 20 bp, Artificial Sequence
  Description of Artificial Sequence: Synthetic oligonucleotide
gcaggctgtgaaggacctca

SEQ ID NO: 13446 - DNA, 20 bp, Artificial Sequence
  Description of Artificial Sequence: Synthetic oligonucleotide
caggctgtgaaggacctcag

SEQ ID NO: 13447 - DNA, 20 bp, Artificial Sequence
  Description of Artificial Sequence: Synthetic oligonucleotide
aggctgtgaaggacctcagg

SEQ ID NO: 13448 - DNA, 20 bp, Artificial Sequence
  Description of Artificial Sequence: Synthetic oligonucleotide
ggctgtgaaggacctcaggg

SEQ ID NO: 13449 - DNA, 20 bp, Artificial Sequence
  Description of Artificial Sequence: Synthetic oligonucleotide
gctgtgaaggacctcagggt

SEQ ID NO: 13450 - DNA, 20 bp, Artificial Sequence
  Description of Artificial Sequence: Synthetic oligonucleotide
ctgtgaaggacctcagggtc

SEQ ID NO: 13451 - DNA, 20 bp, Artificial Sequence
  Description of Artificial Sequence: Synthetic oligonucleotide
tgtgaaggacctcagggtcc

SEQ ID NO: 13452 - DNA, 20 bp, Artificial Sequence
  Description of Artificial Sequence: Synthetic oligonucleotide
gtgaaggacctcagggtcca

SEQ ID NO: 13453 - DNA, 20 bp, Artificial Sequence
  Description of Artificial Sequence: Synthetic oligonucleotide
tgaaggacctcagggtccac

SEQ ID NO: 13454 - DNA, 20 bp, Artificial Sequence
  Description of Artificial Sequence: Synthetic oligonucleotide
gaaggacctcagggtccacc

SEQ ID NO: 13455 - DNA, 20 bp, Artificial Sequence
  Description of Artificial Sequence: Synthetic oligonucleotide
aaggacctcagggtccaccc

SEQ ID NO: 13456 - DNA, 20 bp, Artificial Sequence
  Description of Artificial Sequence: Synthetic oligonucleotide
aggacctcagggtccacccg

SEQ ID NO: 13457 - DNA, 20 bp, Artificial Sequence
  Description of Artificial Sequence: Synthetic oligonucleotide
ggacctcagggtccacccgg

SEQ ID NO: 13458 - DNA, 20 bp, Artificial Sequence
  Description of Artificial Sequence: Synthetic oligonucleotide
gacctcagggtccacccggc

SEQ ID NO: 13459 - DNA, 20 bp, Artificial Sequence
  Description of Artificial Sequence: Synthetic oligonucleotide
acctcagggtccacccggct

SEQ ID NO: 13460 - DNA, 20 bp, Artificial Sequence
  Description of Artificial Sequence: Synthetic oligonucleotide
cctcagggtccacccggctc

SEQ ID NO: 13461 - DNA, 20 bp, Artificial Sequence
  Description of Artificial Sequence: Synthetic oligonucleotide
ctcagggtccacccggctct

SEQ ID NO: 13462 - DNA, 20 bp, Artificial Sequence
  Description of Artificial Sequence: Synthetic oligonucleotide
tcagggtccacccggctctc

SEQ ID NO: 13463 - DNA, 20 bp, Artificial Sequence
  Description of Artificial Sequence: Synthetic oligonucleotide
cagggtccacccggctctca

SEQ ID NO: 13464 - DNA, 20 bp, Artificial Sequence
  Description of Artificial Sequence: Synthetic oligonucleotide
agggtccacccggctctcag

SEQ ID NO: 13465 - DNA, 20 bp, Artificial Sequence
  Description of Artificial Sequence: Synthetic oligonucleotide
gggtccacccggctctcagg

SEQ ID NO: 13466 - DNA, 20 bp, Artificial Sequence
  Description of Artificial Sequence: Synthetic oligonucleotide
ggtccacccggctctcaggg

SEQ ID NO: 13467 - DNA, 20 bp, Artificial Sequence
  Description of Artificial Sequence: Synthetic oligonucleotide
gtccacccggctctcagggg

SEQ ID NO: 13468 - DNA, 20 bp, Artificial Sequence
  Description of Artificial Sequence: Synthetic oligonucleotide
tccacccggctctcaggggc

SEQ ID NO: 13469 - DNA, 20 bp, Artificial Sequence
  Description of Artificial Sequence: Synthetic oligonucleotide
ccacccggctctcaggggct

SEQ ID NO: 13470 - DNA, 20 bp, Artificial Sequence
  Description of Artificial Sequence: Synthetic oligonucleotide
cacccggctctcaggggcta

SEQ ID NO: 13471 - DNA, 20 bp, Artificial Sequence
  Description of Artificial Sequence: Synthetic oligonucleotide
acccggctctcaggggctaa

SEQ ID NO: 13472 - DNA, 20 bp, Artificial Sequence
  Description of Artificial Sequence: Synthetic oligonucleotide
cccggctctcaggggctaac

SEQ ID NO: 13473 - DNA, 20 bp, Artificial Sequence
  Description of Artificial Sequence: Synthetic oligonucleotide
ccggctctcaggggctaacg

SEQ ID NO: 13474 - DNA, 20 bp, Artificial Sequence
  Description of Artificial Sequence: Synthetic oligonucleotide
cggctctcaggggctaacgg

SEQ ID NO: 13475 - DNA, 20 bp, Artificial Sequence
  Description of Artificial Sequence: Synthetic oligonucleotide
ggctctcaggggctaacggg

SEQ ID NO: 13476 - DNA, 20 bp, Artificial Sequence
  Description of Artificial Sequence: Synthetic oligonucleotide
gctctcaggggctaacggga

SEQ ID NO: 13477 - DNA, 20 bp, Artificial Sequence
  Description of Artificial Sequence: Synthetic oligonucleotide
ctctcaggggctaacgggag

SEQ ID NO: 13478 - DNA, 20 bp, Artificial Sequence
  Description of Artificial Sequence: Synthetic oligonucleotide
tctcaggggctaacgggagg

SEQ ID NO: 13479 - DNA, 20 bp, Artificial Sequence
  Description of Artificial Sequence: Synthetic oligonucleotide
ctcaggggctaacgggaggt

SEQ ID NO: 13480 - DNA, 20 bp, Artificial Sequence
  Description of Artificial Sequence: Synthetic oligonucleotide
tcaggggctaacgggaggtc

SEQ ID NO: 13481 - DNA, 20 bp, Artificial Sequence
  Description of Artificial Sequence: Synthetic oligonucleotide
caggggctaacgggaggtcg

SEQ ID NO: 13482 - DNA, 20 bp, Artificial Sequence
  Description of Artificial Sequence: Synthetic oligonucleotide
aggggctaacgggaggtcgg

SEQ ID NO: 13483 - DNA, 20 bp, Artificial Sequence
  Description of Artificial Sequence: Synthetic oligonucleotide
ggggctaacgggaggtcggt

SEQ ID NO: 13484 - DNA, 20 bp, Artificial Sequence
  Description of Artificial Sequence: Synthetic oligonucleotide
gggctaacgggaggtcggtg

SEQ ID NO: 13485 - DNA, 20 bp, Artificial Sequence
  Description of Artificial Sequence: Synthetic oligonucleotide
ggctaacgggaggtcggtgg

SEQ ID NO: 13486 - DNA, 20 bp, Artificial Sequence
  Description of Artificial Sequence: Synthetic oligonucleotide
gctaacgggaggtcggtgga

SEQ ID NO: 13487 - DNA, 20 bp, Artificial Sequence
  Description of Artificial Sequence: Synthetic oligonucleotide
ctaacgggaggtcggtggac

SEQ ID NO: 13488 - DNA, 20 bp, Artificial Sequence
  Description of Artificial Sequence: Synthetic oligonucleotide
taacgggaggtcggtggacc

SEQ ID NO: 13489 - DNA, 20 bp, Artificial Sequence
  Description of Artificial Sequence: Synthetic oligonucleotide
aacgggaggtcggtggaccc

SEQ ID NO: 13490 - DNA, 20 bp, Artificial Sequence
  Description of Artificial Sequence: Synthetic oligonucleotide
acgggaggtcggtggacccc

SEQ ID NO: 13491 - DNA, 20 bp, Artificial Sequence
  Description of Artificial Sequence: Synthetic oligonucleotide
cgggaggtcggtggacccct

SEQ ID NO: 13492 - DNA, 20 bp, Artificial Sequence
  Description of Artificial Sequence: Synthetic oligonucleotide
gggaggtcggtggacccctc

SEQ ID NO: 13493 - DNA, 20 bp, Artificial Sequence
  Description of Artificial Sequence: Synthetic oligonucleotide
ggaggtcggtggacccctcg

SEQ ID NO: 13494 - DNA, 20 bp, Artificial Sequence
  Description of Artificial Sequence: Synthetic oligonucleotide
gaggtcggtggacccctcgg

SEQ ID NO: 13495 - DNA, 20 bp, Artificial Sequence
  Description of Artificial Sequence: Synthetic oligonucleotide
aggtcggtggacccctcggt

SEQ ID NO: 13496 - DNA, 20 bp, Artificial Sequence
  Description of Artificial Sequence: Synthetic oligonucleotide
ggtcggtggacccctcggtt

SEQ ID NO: 13497 - DNA, 20 bp, Artificial Sequence
  Description of Artificial Sequence: Synthetic oligonucleotide
gtcggtggacccctcggttc

SEQ ID NO: 13498 - DNA, 20 bp, Artificial Sequence
  Description of Artificial Sequence: Synthetic oligonucleotide
tcggtggacccctcggttcc

SEQ ID NO: 13499 - DNA, 20 bp, Artificial Sequence
  Description of Artificial Sequence: Synthetic oligonucleotide
cggtggacccctcggttccc

SEQ ID NO: 13500 - DNA, 20 bp, Artificial Sequence
  Description of Artificial Sequence: Synthetic oligonucleotide
ggtggacccctcggttccct

SEQ ID NO: 13501 - DNA, 20 bp, Artificial Sequence
  Description of Artificial Sequence: Synthetic oligonucleotide
gtggacccctcggttccctg

SEQ ID NO: 13502 - DNA, 20 bp, Artificial Sequence
  Description of Artificial Sequence: Synthetic oligonucleotide
tggacccctcggttccctga

SEQ ID NO: 13503 - DNA, 20 bp, Artificial Sequence
  Description of Artificial Sequence: Synthetic oligonucleotide
ggacccctcggttccctgac

SEQ ID NO: 13504 - DNA, 20 bp, Artificial Sequence
  Description of Artificial Sequence: Synthetic oligonucleotide
gacccctcggttccctgaca

SEQ ID NO: 13505 - DNA, 20 bp, Artificial Sequence
  Description of Artificial Sequence: Synthetic oligonucleotide
acccctcggttccctgacag

SEQ ID NO: 13506 - DNA, 20 bp, Artificial Sequence
  Description of Artificial Sequence: Synthetic oligonucleotide
cccctcggttccctgacagg

SEQ ID NO: 13507 - DNA, 20 bp, Artificial Sequence
  Description of Artificial Sequence: Synthetic oligonucleotide
ccctcggttccctgacaggc

SEQ ID NO: 13508 - DNA, 20 bp, Artificial Sequence
  Description of Artificial Sequence: Synthetic oligonucleotide
cctcggttccctgacaggcg

SEQ ID NO: 13509 - DNA, 20 bp, Artificial Sequence
  Description of Artificial Sequence: Synthetic oligonucleotide
ctcggttccctgacaggcgg

SEQ ID NO: 13510 - DNA, 20 bp, Artificial Sequence
  Description of Artificial Sequence: Synthetic oligonucleotide
tcggttccctgacaggcgga

SEQ ID NO: 13511 - DNA, 20 bp, Artificial Sequence
  Description of Artificial Sequence: Synthetic oligonucleotide
cggttccctgacaggcggac

SEQ ID NO: 13512 - DNA, 20 bp, Artificial Sequence
  Description of Artificial Sequence: Synthetic oligonucleotide
ggttccctgacaggcggacc

SEQ ID NO: 13513 - DNA, 20 bp, Artificial Sequence
  Description of Artificial Sequence: Synthetic oligonucleotide
gttccctgacaggcggaccc

SEQ ID NO: 13514 - DNA, 20 bp, Artificial Sequence
  Description of Artificial Sequence: Synthetic oligonucleotide
ttccctgacaggcggacccg

SEQ ID NO: 13515 - DNA, 20 bp, Artificial Sequence
  Description of Artificial Sequence: Synthetic oligonucleotide
tccctgacaggcggacccgc

SEQ ID NO: 13516 - DNA, 20 bp, Artificial Sequence
  Description of Artificial Sequence: Synthetic oligonucleotide
ccctgacaggcggacccgca

SEQ ID NO: 13517 - DNA, 20 bp, Artificial Sequence
  Description of Artificial Sequence: Synthetic oligonucleotide
cctgacaggcggacccgcac

SEQ ID NO: 13518 - DNA, 20 bp, Artificial Sequence
  Description of Artificial Sequence: Synthetic oligonucleotide
ctgacaggcggacccgcacg

SEQ ID NO: 13519 - DNA, 20 bp, Artificial Sequence
  Description of Artificial Sequence: Synthetic oligonucleotide
tgacaggcggacccgcacgc

SEQ ID NO: 13520 - DNA, 20 bp, Artificial Sequence
  Description of Artificial Sequence: Synthetic oligonucleotide
gacaggcggacccgcacgcg

SEQ ID NO: 13521 - DNA, 20 bp, Artificial Sequence
  Description of Artificial Sequence: Synthetic oligonucleotide
acaggcggacccgcacgcgc

SEQ ID NO: 13522 - DNA, 20 bp, Artificial Sequence
  Description of Artificial Sequence: Synthetic oligonucleotide
caggcggacccgcacgcgct

SEQ ID NO: 13523 - DNA, 20 bp, Artificial Sequence
  Description of Artificial Sequence: Synthetic oligonucleotide
aggcggacccgcacgcgctc

SEQ ID NO: 13524 - DNA, 20 bp, Artificial Sequence
  Description of Artificial Sequence: Synthetic oligonucleotide
ggcggacccgcacgcgctca

SEQ ID NO: 13525 - DNA, 20 bp, Artificial Sequence
  Description of Artificial Sequence: Synthetic oligonucleotide
gcggacccgcacgcgctcag

SEQ ID NO: 13526 - DNA, 20 bp, Artificial Sequence
  Description of Artificial Sequence: Synthetic oligonucleotide
cggacccgcacgcgctcagg

SEQ ID NO: 13527 - DNA, 20 bp, Artificial Sequence
  Description of Artificial Sequence: Synthetic oligonucleotide
ggacccgcacgcgctcaggc

SEQ ID NO: 13528 - DNA, 20 bp, Artificial Sequence
  Description of Artificial Sequence: Synthetic oligonucleotide
gacccgcacgcgctcaggcg

SEQ ID NO: 13529 - DNA, 20 bp, Artificial Sequence
  Description of Artificial Sequence: Synthetic oligonucleotide
acccgcacgcgctcaggcgc

SEQ ID NO: 13530 - DNA, 20 bp, Artificial Sequence
  Description of Artificial Sequence: Synthetic oligonucleotide
cccgcacgcgctcaggcgcc

SEQ ID NO: 13531 - DNA, 20 bp, Artificial Sequence
  Description of Artificial Sequence: Synthetic oligonucleotide
ccgcacgcgctcaggcgccg

SEQ ID NO: 13532 - DNA, 20 bp, Artificial Sequence
  Description of Artificial Sequence: Synthetic oligonucleotide
cgcacgcgctcaggcgccgc

SEQ ID NO: 13533 - DNA, 20 bp, Artificial Sequence
  Description of Artificial Sequence: Synthetic oligonucleotide
gcacgcgctcaggcgccgct

SEQ ID NO: 13534 - DNA, 20 bp, Artificial Sequence
  Description of Artificial Sequence: Synthetic oligonucleotide
cacgcgctcaggcgccgctc

SEQ ID NO: 13535 - DNA, 20 bp, Artificial Sequence
  Description of Artificial Sequence: Synthetic oligonucleotide
acgcgctcaggcgccgctcc

SEQ ID NO: 13536 - DNA, 20 bp, Artificial Sequence
  Description of Artificial Sequence: Synthetic oligonucleotide
cgcgctcaggcgccgctcca

SEQ ID NO: 13537 - DNA, 20 bp, Artificial Sequence
  Description of Artificial Sequence: Synthetic oligonucleotide
gcgctcaggcgccgctccag

SEQ ID NO: 13538 - DNA, 20 bp, Artificial Sequence
  Description of Artificial Sequence: Synthetic oligonucleotide
cgctcaggcgccgctccagc

SEQ ID NO: 13539 - DNA, 20 bp, Artificial Sequence
  Description of Artificial Sequence: Synthetic oligonucleotide
gctcaggcgccgctccagcg

SEQ ID NO: 13540 - DNA, 20 bp, Artificial Sequence
  Description of Artificial Sequence: Synthetic oligonucleotide
ctcaggcgccgctccagcgc

SEQ ID NO: 13541 - DNA, 20 bp, Artificial Sequence
  Description of Artificial Sequence: Synthetic oligonucleotide
tcaggcgccgctccagcgcg

SEQ ID NO: 13542 - DNA, 20 bp, Artificial Sequence
  Description of Artificial Sequence: Synthetic oligonucleotide
caggcgccgctccagcgcgc

SEQ ID NO: 13543 - DNA, 20 bp, Artificial Sequence
  Description of Artificial Sequence: Synthetic oligonucleotide
aggcgccgctccagcgcgct

SEQ ID NO: 13544 - DNA, 20 bp, Artificial Sequence
  Description of Artificial Sequence: Synthetic oligonucleotide
ggcgccgctccagcgcgctc

SEQ ID NO: 13545 - DNA, 20 bp, Artificial Sequence
  Description of Artificial Sequence: Synthetic oligonucleotide
gcgccgctccagcgcgctca

SEQ ID NO: 13546 - DNA, 20 bp, Artificial Sequence
  Description of Artificial Sequence: Synthetic oligonucleotide
cgccgctccagcgcgctcag

SEQ ID NO: 13547 - DNA, 20 bp, Artificial Sequence
  Description of Artificial Sequence: Synthetic oligonucleotide
gccgctccagcgcgctcagc

SEQ ID NO: 13548 - DNA, 20 bp, Artificial Sequence
  Description of Artificial Sequence: Synthetic oligonucleotide
ccgctccagcgcgctcagct

SEQ ID NO: 13549 - DNA, 20 bp, Artificial Sequence
  Description of Artificial Sequence: Synthetic oligonucleotide
cgctccagcgcgctcagctg

SEQ ID NO: 13550 - DNA, 20 bp, Artificial Sequence
  Description of Artificial Sequence: Synthetic oligonucleotide
gctccagcgcgctcagctga

SEQ ID NO: 13551 - DNA, 20 bp, Artificial Sequence
  Description of Artificial Sequence: Synthetic oligonucleotide
ctccagcgcgctcagctgac

SEQ ID NO: 13552 - DNA, 20 bp, Artificial Sequence
  Description of Artificial Sequence: Synthetic oligonucleotide
tccagcgcgctcagctgact

SEQ ID NO: 13553 - DNA, 20 bp, Artificial Sequence
  Description of Artificial Sequence: Synthetic oligonucleotide
ccagcgcgctcagctgactg

SEQ ID NO: 13554 - DNA, 20 bp, Artificial Sequence
  Description of Artificial Sequence: Synthetic oligonucleotide
cagcgcgctcagctgactgc

SEQ ID NO: 13555 - DNA, 20 bp, Artificial Sequence
  Description of Artificial Sequence: Synthetic oligonucleotide
agcgcgctcagctgactgcg

SEQ ID NO: 13556 - DNA, 20 bp, Artificial Sequence
  Description of Artificial Sequence: Synthetic oligonucleotide
gcgcgctcagctgactgcgg

SEQ ID NO: 13557 - DNA, 20 bp, Artificial Sequence
  Description of Artificial Sequence: Synthetic oligonucleotide
cgcgctcagctgactgcggg

SEQ ID NO: 13558 - DNA, 20 bp, Artificial Sequence
  Description of Artificial Sequence: Synthetic oligonucleotide
gcgctcagctgactgcgggt

SEQ ID NO: 13559 - DNA, 20 bp, Artificial Sequence
  Description of Artificial Sequence: Synthetic oligonucleotide
cgctcagctgactgcgggtg

SEQ ID NO: 13560 - DNA, 20 bp, Artificial Sequence
  Description of Artificial Sequence: Synthetic oligonucleotide
gctcagctgactgcgggtgc

SEQ ID NO: 13561 - DNA, 20 bp, Artificial Sequence
  Description of Artificial Sequence: Synthetic oligonucleotide
ctcagctgactgcgggtgcg

SEQ ID NO: 13562 - DNA, 20 bp, Artificial Sequence
  Description of Artificial Sequence: Synthetic oligonucleotide
tcagctgactgcgggtgcgc

SEQ ID NO: 13563 - DNA, 20 bp, Artificial Sequence
  Description of Artificial Sequence: Synthetic oligonucleotide
cagctgactgcgggtgcgct

SEQ ID NO: 13564 - DNA, 20 bp, Artificial Sequence
  Description of Artificial Sequence: Synthetic oligonucleotide
agctgactgcgggtgcgctc

SEQ ID NO: 13565 - DNA, 20 bp, Artificial Sequence
  Description of Artificial Sequence: Synthetic oligonucleotide
gctgactgcgggtgcgctcc

SEQ ID NO: 13566 - DNA, 20 bp, Artificial Sequence
  Description of Artificial Sequence: Synthetic oligonucleotide
ctgactgcgggtgcgctccg

SEQ ID NO: 13567 - DNA, 20 bp, Artificial Sequence
  Description of Artificial Sequence: Synthetic oligonucleotide
tgactgcgggtgcgctccgc

SEQ ID NO: 13568 - DNA, 20 bp, Artificial Sequence
  Description of Artificial Sequence: Synthetic oligonucleotide
gactgcgggtgcgctccgcg

SEQ ID NO: 13569 - DNA, 20 bp, Artificial Sequence
  Description of Artificial Sequence: Synthetic oligonucleotide
actgcgggtgcgctccgcgt

SEQ ID NO: 13570 - DNA, 20 bp, Artificial Sequence
  Description of Artificial Sequence: Synthetic oligonucleotide
ctgcgggtgcgctccgcgtg

SEQ ID NO: 13571 - DNA, 20 bp, Artificial Sequence
  Description of Artificial Sequence: Synthetic oligonucleotide
tgcgggtgcgctccgcgtgt

SEQ ID NO: 13572 - DNA, 20 bp, Artificial Sequence
  Description of Artificial Sequence: Synthetic oligonucleotide
gcgggtgcgctccgcgtgtt

SEQ ID NO: 13573 - DNA, 20 bp, Artificial Sequence
  Description of Artificial Sequence: Synthetic oligonucleotide
cgggtgcgctccgcgtgttc

SEQ ID NO: 13574 - DNA, 20 bp, Artificial Sequence
  Description of Artificial Sequence: Synthetic oligonucleotide
gggtgcgctccgcgtgttcg

SEQ ID NO: 13575 - DNA, 20 bp, Artificial Sequence
  Description of Artificial Sequence: Synthetic oligonucleotide
ggtgcgctccgcgtgttcgc

SEQ ID NO: 13576 - DNA, 20 bp, Artificial Sequence
  Description of Artificial Sequence: Synthetic oligonucleotide
gtgcgctccgcgtgttcgcg

SEQ ID NO: 13577 - DNA, 20 bp, Artificial Sequence
  Description of Artificial Sequence: Synthetic oligonucleotide
tgcgctccgcgtgttcgcgc

SEQ ID NO: 13578 - DNA, 20 bp, Artificial Sequence
  Description of Artificial Sequence: Synthetic oligonucleotide
gcgctccgcgtgttcgcgca

SEQ ID NO: 13579 - DNA, 20 bp, Artificial Sequence
  Description of Artificial Sequence: Synthetic oligonucleotide
cgctccgcgtgttcgcgcag

SEQ ID NO: 13580 - DNA, 20 bp, Artificial Sequence
  Description of Artificial Sequence: Synthetic oligonucleotide
gctccgcgtgttcgcgcagc

SEQ ID NO: 13581 - DNA, 20 bp, Artificial Sequence
  Description of Artificial Sequence: Synthetic oligonucleotide
ctccgcgtgttcgcgcagcc

SEQ ID NO: 13582 - DNA, 20 bp, Artificial Sequence
  Description of Artificial Sequence: Synthetic oligonucleotide
tccgcgtgttcgcgcagccc

SEQ ID NO: 13583 - DNA, 20 bp, Artificial Sequence
  Description of Artificial Sequence: Synthetic oligonucleotide
ccgcgtgttcgcgcagcccc

SEQ ID NO: 13584 - DNA, 20 bp, Artificial Sequence
  Description of Artificial Sequence: Synthetic oligonucleotide
cgcgtgttcgcgcagcccct

SEQ ID NO: 13585 - DNA, 20 bp, Artificial Sequence
  Description of Artificial Sequence: Synthetic oligonucleotide
gcgtgttcgcgcagcccctg

SEQ ID NO: 13586 - DNA, 20 bp, Artificial Sequence
  Description of Artificial Sequence: Synthetic oligonucleotide
cgtgttcgcgcagcccctgg

SEQ ID NO: 13587 - DNA, 20 bp, Artificial Sequence
  Description of Artificial Sequence: Synthetic oligonucleotide
gtgttcgcgcagcccctggc

SEQ ID NO: 13588 - DNA, 20 bp, Artificial Sequence
  Description of Artificial Sequence: Synthetic oligonucleotide
tgttcgcgcagcccctggcc

SEQ ID NO: 13589 - DNA, 20 bp, Artificial Sequence
  Description of Artificial Sequence: Synthetic oligonucleotide
gttcgcgcagcccctggccg

SEQ ID NO: 13590 - DNA, 20 bp, Artificial Sequence
  Description of Artificial Sequence: Synthetic oligonucleotide
ttcgcgcagcccctggccga

SEQ ID NO: 13591 - DNA, 20 bp, Artificial Sequence
  Description of Artificial Sequence: Synthetic oligonucleotide
tcgcgcagcccctggccgag

SEQ ID NO: 13592 - DNA, 20 bp, Artificial Sequence
  Description of Artificial Sequence: Synthetic oligonucleotide
cgcgcagcccctggccgagc

SEQ ID NO: 13593 - DNA, 20 bp, Artificial Sequence
  Description of Artificial Sequence: Synthetic oligonucleotide
gcgcagcccctggccgagct

SEQ ID NO: 13594 - DNA, 20 bp, Artificial Sequence
  Description of Artificial Sequence: Synthetic oligonucleotide
cgcagcccctggccgagctg

SEQ ID NO: 13595 - DNA, 20 bp, Artificial Sequence
  Description of Artificial Sequence: Synthetic oligonucleotide
gcagcccctggccgagctgc

SEQ ID NO: 13596 - DNA, 20 bp, Artificial Sequence
  Description of Artificial Sequence: Synthetic oligonucleotide
cagcccctggccgagctgca

SEQ ID NO: 13597 - DNA, 20 bp, Artificial Sequence
  Description of Artificial Sequence: Synthetic oligonucleotide
agcccctggccgagctgcag

SEQ ID NO: 13598 - DNA, 20 bp, Artificial Sequence
  Description of Artificial Sequence: Synthetic oligonucleotide
gcccctggccgagctgcagg

SEQ ID NO: 13599 - DNA, 20 bp, Artificial Sequence
  Description of Artificial Sequence: Synthetic oligonucleotide
cccctggccgagctgcagga

SEQ ID NO: 13600 - DNA, 20 bp, Artificial Sequence
  Description of Artificial Sequence: Synthetic oligonucleotide
ccctggccgagctgcaggag

SEQ ID NO: 13601 - DNA, 20 bp, Artificial Sequence
  Description of Artificial Sequence: Synthetic oligonucleotide
cctggccgagctgcaggagt

SEQ ID NO: 13602 - DNA, 20 bp, Artificial Sequence
  Description of Artificial Sequence: Synthetic oligonucleotide
ctggccgagctgcaggagtc

SEQ ID NO: 13603 - DNA, 20 bp, Artificial Sequence
  Description of Artificial Sequence: Synthetic oligonucleotide
tggccgagctgcaggagtcc

SEQ ID NO: 13604 - DNA, 20 bp, Artificial Sequence
  Description of Artificial Sequence: Synthetic oligonucleotide
ggccgagctgcaggagtccg

SEQ ID NO: 13605 - DNA, 20 bp, Artificial Sequence
  Description of Artificial Sequence: Synthetic oligonucleotide
gccgagctgcaggagtccgt

SEQ ID NO: 13606 - DNA, 20 bp, Artificial Sequence
  Description of Artificial Sequence: Synthetic oligonucleotide
ccgagctgcaggagtccgtg

SEQ ID NO: 13607 - DNA, 20 bp, Artificial Sequence
  Description of Artificial Sequence: Synthetic oligonucleotide
cgagctgcaggagtccgtgc

SEQ ID NO: 13608 - DNA, 20 bp, Artificial Sequence
  Description of Artificial Sequence: Synthetic oligonucleotide
gagctgcaggagtccgtgcg

SEQ ID NO: 13609 - DNA, 20 bp, Artificial Sequence
  Description of Artificial Sequence: Synthetic oligonucleotide
agctgcaggagtccgtgcgc

SEQ ID NO: 13610 - DNA, 20 bp, Artificial Sequence
  Description of Artificial Sequence: Synthetic oligonucleotide
gctgcaggagtccgtgcgcc

SEQ ID NO: 13611 - DNA, 20 bp, Artificial Sequence
  Description of Artificial Sequence: Synthetic oligonucleotide
ctgcaggagtccgtgcgcca

SEQ ID NO: 13612 - DNA, 20 bp, Artificial Sequence
  Description of Artificial Sequence: Synthetic oligonucleotide
tgcaggagtccgtgcgccag

SEQ ID NO: 13613 - DNA, 20 bp, Artificial Sequence
  Description of Artificial Sequence: Synthetic oligonucleotide
gcaggagtccgtgcgccagg

SEQ ID NO: 13614 - DNA, 20 bp, Artificial Sequence
  Description of Artificial Sequence: Synthetic oligonucleotide
caggagtccgtgcgccagga

SEQ ID NO: 13615 - DNA, 20 bp, Artificial Sequence
  Description of Artificial Sequence: Synthetic oligonucleotide
aggagtccgtgcgccaggac

SEQ ID NO: 13616 - DNA, 20 bp, Artificial Sequence
  Description of Artificial Sequence: Synthetic oligonucleotide
ggagtccgtgcgccaggaca

SEQ ID NO: 13617 - DNA, 20 bp, Artificial Sequence
  Description of Artificial Sequence: Synthetic oligonucleotide
gagtccgtgcgccaggacat

SEQ ID NO: 13618 - DNA, 20 bp, Artificial Sequence
  Description of Artificial Sequence: Synthetic oligonucleotide
agtccgtgcgccaggacatt

SEQ ID NO: 13619 - DNA, 20 bp, Artificial Sequence
  Description of Artificial Sequence: Synthetic oligonucleotide
gtccgtgcgccaggacattc

SEQ ID NO: 13620 - DNA, 20 bp, Artificial Sequence
  Description of Artificial Sequence: Synthetic oligonucleotide
tccgtgcgccaggacattca

SEQ ID NO: 13621 - DNA, 20 bp, Artificial Sequence
  Description of Artificial Sequence: Synthetic oligonucleotide
ccgtgcgccaggacattcat

SEQ ID NO: 13622 - DNA, 20 bp, Artificial Sequence
  Description of Artificial Sequence: Synthetic oligonucleotide
cgtgcgccaggacattcatc

SEQ ID NO: 13623 - DNA, 20 bp, Artificial Sequence
  Description of Artificial Sequence: Synthetic oligonucleotide
gtgcgccaggacattcatct

SEQ ID NO: 13624 - DNA, 20 bp, Artificial Sequence
  Description of Artificial Sequence: Synthetic oligonucleotide
tgcgccaggacattcatctc

SEQ ID NO: 13625 - DNA, 20 bp, Artificial Sequence
  Description of Artificial Sequence: Synthetic oligonucleotide
gcgccaggacattcatctcg

SEQ ID NO: 13626 - DNA, 20 bp, Artificial Sequence
  Description of Artificial Sequence: Synthetic oligonucleotide
cgccaggacattcatctcgt

SEQ ID NO: 13627 - DNA, 20 bp, Artificial Sequence
  Description of Artificial Sequence: Synthetic oligonucleotide
gccaggacattcatctcgtc

SEQ ID NO: 13628 - DNA, 20 bp, Artificial Sequence
  Description of Artificial Sequence: Synthetic oligonucleotide
ccaggacattcatctcgtcc

SEQ ID NO: 13629 - DNA, 20 bp, Artificial Sequence
  Description of Artificial Sequence: Synthetic oligonucleotide
caggacattcatctcgtccc

SEQ ID NO: 13630 - DNA, 20 bp, Artificial Sequence
  Description of Artificial Sequence: Synthetic oligonucleotide
aggacattcatctcgtccca

SEQ ID NO: 13631 - DNA, 20 bp, Artificial Sequence
  Description of Artificial Sequence: Synthetic oligonucleotide
ggacattcatctcgtcccag

SEQ ID NO: 13632 - DNA, 20 bp, Artificial Sequence
  Description of Artificial Sequence: Synthetic oligonucleotide
gacattcatctcgtcccagg

SEQ ID NO: 13633 - DNA, 20 bp, Artificial Sequence
  Description of Artificial Sequence: Synthetic oligonucleotide
acattcatctcgtcccagga

SEQ ID NO: 13634 - DNA, 20 bp, Artificial Sequence
  Description of Artificial Sequence: Synthetic oligonucleotide
cattcatctcgtcccaggac

SEQ ID NO: 13635 - DNA, 20 bp, Artificial Sequence
  Description of Artificial Sequence: Synthetic oligonucleotide
attcatctcgtcccaggacg

SEQ ID NO: 13636 - DNA, 20 bp, Artificial Sequence
  Description of Artificial Sequence: Synthetic oligonucleotide
ttcatctcgtcccaggacgc

SEQ ID NO: 13637 - DNA, 20 bp, Artificial Sequence
  Description of Artificial Sequence: Synthetic oligonucleotide
tcatctcgtcccaggacgca

SEQ ID NO: 13638 - DNA, 20 bp, Artificial Sequence
  Description of Artificial Sequence: Synthetic oligonucleotide
catctcgtcccaggacgcaa

SEQ ID NO: 13639 - DNA, 20 bp, Artificial Sequence
  Description of Artificial Sequence: Synthetic oligonucleotide
atctcgtcccaggacgcaaa

SEQ ID NO: 13640 - DNA, 20 bp, Artificial Sequence
  Description of Artificial Sequence: Synthetic oligonucleotide
tctcgtcccaggacgcaaag

SEQ ID NO: 13641 - DNA, 20 bp, Artificial Sequence
  Description of Artificial Sequence: Synthetic oligonucleotide
ctcgtcccaggacgcaaagc

SEQ ID NO: 13642 - DNA, 20 bp, Artificial Sequence
  Description of Artificial Sequence: Synthetic oligonucleotide
tcgtcccaggacgcaaagcg

SEQ ID NO: 13643 - DNA, 20 bp, Artificial Sequence
  Description of Artificial Sequence: Synthetic oligonucleotide
cgtcccaggacgcaaagcgc

SEQ ID NO: 13644 - DNA, 20 bp, Artificial Sequence
  Description of Artificial Sequence: Synthetic oligonucleotide
gtcccaggacgcaaagcgcg

SEQ ID NO: 13645 - DNA, 20 bp, Artificial Sequence
  Description of Artificial Sequence: Synthetic oligonucleotide
tcccaggacgcaaagcgcgg

SEQ ID NO: 13646 - DNA, 20 bp, Artificial Sequence
  Description of Artificial Sequence: Synthetic oligonucleotide
cccaggacgcaaagcgcggc

SEQ ID NO: 13647 - DNA, 20 bp, Artificial Sequence
  Description of Artificial Sequence: Synthetic oligonucleotide
ccaggacgcaaagcgcggcg

SEQ ID NO: 13648 - DNA, 20 bp, Artificial Sequence
  Description of Artificial Sequence: Synthetic oligonucleotide
caggacgcaaagcgcggcga

SEQ ID NO: 13649 - DNA, 20 bp, Artificial Sequence
  Description of Artificial Sequence: Synthetic oligonucleotide
aggacgcaaagcgcggcgac

SEQ ID NO: 13650 - DNA, 20 bp, Artificial Sequence
  Description of Artificial Sequence: Synthetic oligonucleotide
ggacgcaaagcgcggcgact

SEQ ID NO: 13651 - DNA, 20 bp, Artificial Sequence
  Description of Artificial Sequence: Synthetic oligonucleotide
gacgcaaagcgcggcgactt

SEQ ID NO: 13652 - DNA, 20 bp, Artificial Sequence
  Description of Artificial Sequence: Synthetic oligonucleotide
acgcaaagcgcggcgacttg

SEQ ID NO: 13653 - DNA, 20 bp, Artificial Sequence
  Description of Artificial Sequence: Synthetic oligonucleotide
cgcaaagcgcggcgacttgg

SEQ ID NO: 13654 - DNA, 20 bp, Artificial Sequence
  Description of Artificial Sequence: Synthetic oligonucleotide
gcaaagcgcggcgacttgga

SEQ ID NO: 13655 - DNA, 20 bp, Artificial Sequence
  Description of Artificial Sequence: Synthetic oligonucleotide
caaagcgcggcgacttggac

SEQ ID NO: 13656 - DNA, 20 bp, Artificial Sequence
  Description of Artificial Sequence: Synthetic oligonucleotide
aaagcgcggcgacttggact

SEQ ID NO: 13657 - DNA, 20 bp, Artificial Sequence
  Description of Artificial Sequence: Synthetic oligonucleotide
aagcgcggcgacttggactg

SEQ ID NO: 13658 - DNA, 20 bp, Artificial Sequence
  Description of Artificial Sequence: Synthetic oligonucleotide
agcgcggcgacttggactgc

SEQ ID NO: 13659 - DNA, 20 bp, Artificial Sequence
  Description of Artificial Sequence: Synthetic oligonucleotide
gcgcggcgacttggactgca

SEQ ID NO: 13660 - DNA, 20 bp, Artificial Sequence
  Description of Artificial Sequence: Synthetic oligonucleotide
cgcggcgacttggactgcac

SEQ ID NO: 13661 - DNA, 20 bp, Artificial Sequence
  Description of Artificial Sequence: Synthetic oligonucleotide
gcggcgacttggactgcacg

SEQ ID NO: 13662 - DNA, 20 bp, Artificial Sequence
  Description of Artificial Sequence: Synthetic oligonucleotide
cggcgacttggactgcacgg

SEQ ID NO: 13663 - DNA, 20 bp, Artificial Sequence
  Description of Artificial Sequence: Synthetic oligonucleotide
ggcgacttggactgcacggg

SEQ ID NO: 13664 - DNA, 20 bp, Artificial Sequence
  Description of Artificial Sequence: Synthetic oligonucleotide
gcgacttggactgcacgggt

SEQ ID NO: 13665 - DNA, 20 bp, Artificial Sequence
  Description of Artificial Sequence: Synthetic oligonucleotide
cgacttggactgcacgggtc

SEQ ID NO: 13666 - DNA, 20 bp, Artificial Sequence
  Description of Artificial Sequence: Synthetic oligonucleotide
gacttggactgcacgggtcc

SEQ ID NO: 13667 - DNA, 20 bp, Artificial Sequence
  Description of Artificial Sequence: Synthetic oligonucleotide
acttggactgcacgggtccg

SEQ ID NO: 13668 - DNA, 20 bp, Artificial Sequence
  Description of Artificial Sequence: Synthetic oligonucleotide
cttggactgcacgggtccgc

SEQ ID NO: 13669 - DNA, 20 bp, Artificial Sequence
  Description of Artificial Sequence: Synthetic oligonucleotide
ttggactgcacgggtccgcc

SEQ ID NO: 13670 - DNA, 20 bp, Artificial Sequence
  Description of Artificial Sequence: Synthetic oligonucleotide
tggactgcacgggtccgccc

SEQ ID NO: 13671 - DNA, 20 bp, Artificial Sequence
  Description of Artificial Sequence: Synthetic oligonucleotide
ggactgcacgggtccgccct

SEQ ID NO: 13672 - DNA, 20 bp, Artificial Sequence
  Description of Artificial Sequence: Synthetic oligonucleotide
gactgcacgggtccgccctg

SEQ ID NO: 13673 - DNA, 20 bp, Artificial Sequence
  Description of Artificial Sequence: Synthetic oligonucleotide
actgcacgggtccgccctga

SEQ ID NO: 13674 - DNA, 20 bp, Artificial Sequence
  Description of Artificial Sequence: Synthetic oligonucleotide
ctgcacgggtccgccctgag

SEQ ID NO: 13675 - DNA, 20 bp, Artificial Sequence
  Description of Artificial Sequence: Synthetic oligonucleotide
tgcacgggtccgccctgagc

SEQ ID NO: 13676 - DNA, 20 bp, Artificial Sequence
  Description of Artificial Sequence: Synthetic oligonucleotide
gcacgggtccgccctgagcg

SEQ ID NO: 13677 - DNA, 20 bp, Artificial Sequence
  Description of Artificial Sequence: Synthetic oligonucleotide
cacgggtccgccctgagcgc

SEQ ID NO: 13678 - DNA, 20 bp, Artificial Sequence
  Description of Artificial Sequence: Synthetic oligonucleotide
acgggtccgccctgagcgct

SEQ ID NO: 13679 - DNA, 20 bp, Artificial Sequence
  Description of Artificial Sequence: Synthetic oligonucleotide
cgggtccgccctgagcgctc

SEQ ID NO: 13680 - DNA, 20 bp, Artificial Sequence
  Description of Artificial Sequence: Synthetic oligonucleotide
gggtccgccctgagcgctca

SEQ ID NO: 13681 - DNA, 20 bp, Artificial Sequence
  Description of Artificial Sequence: Synthetic oligonucleotide
ggtccgccctgagcgctcag

SEQ ID NO: 13682 - DNA, 20 bp, Artificial Sequence
  Description of Artificial Sequence: Synthetic oligonucleotide
gtccgccctgagcgctcagt

SEQ ID NO: 13683 - DNA, 20 bp, Artificial Sequence
  Description of Artificial Sequence: Synthetic oligonucleotide
tccgccctgagcgctcagta

SEQ ID NO: 13684 - DNA, 20 bp, Artificial Sequence
  Description of Artificial Sequence: Synthetic oligonucleotide
ccgccctgagcgctcagtag

SEQ ID NO: 13685 - DNA, 20 bp, Artificial Sequence
  Description of Artificial Sequence: Synthetic oligonucleotide
cgccctgagcgctcagtagc

SEQ ID NO: 13686 - DNA, 20 bp, Artificial Sequence
  Description of Artificial Sequence: Synthetic oligonucleotide
gccctgagcgctcagtagca

SEQ ID NO: 13687 - DNA, 20 bp, Artificial Sequence
  Description of Artificial Sequence: Synthetic oligonucleotide
ccctgagcgctcagtagcac

SEQ ID NO: 13688 - DNA, 20 bp, Artificial Sequence
  Description of Artificial Sequence: Synthetic oligonucleotide
cctgagcgctcagtagcacg

SEQ ID NO: 13689 - DNA, 20 bp, Artificial Sequence
  Description of Artificial Sequence: Synthetic oligonucleotide
ctgagcgctcagtagcacgg

SEQ ID NO: 13690 - DNA, 20 bp, Artificial Sequence
  Description of Artificial Sequence: Synthetic oligonucleotide
tgagcgctcagtagcacggc

SEQ ID NO: 13691 - DNA, 20 bp, Artificial Sequence
  Description of Artificial Sequence: Synthetic oligonucleotide
gagcgctcagtagcacggcg

SEQ ID NO: 13692 - DNA, 20 bp, Artificial Sequence
  Description of Artificial Sequence: Synthetic oligonucleotide
agcgctcagtagcacggcgg

SEQ ID NO: 13693 - DNA, 20 bp, Artificial Sequence
  Description of Artificial Sequence: Synthetic oligonucleotide
gcgctcagtagcacggcggt

SEQ ID NO: 13694 - DNA, 20 bp, Artificial Sequence
  Description of Artificial Sequence: Synthetic oligonucleotide
cgctcagtagcacggcggtg

SEQ ID NO: 13695 - DNA, 20 bp, Artificial Sequence
  Description of Artificial Sequence: Synthetic oligonucleotide
gctcagtagcacggcggtgg

SEQ ID NO: 13696 - DNA, 20 bp, Artificial Sequence
  Description of Artificial Sequence: Synthetic oligonucleotide
ctcagtagcacggcggtggc

SEQ ID NO: 13697 - DNA, 20 bp, Artificial Sequence
  Description of Artificial Sequence: Synthetic oligonucleotide
tcagtagcacggcggtggcg

SEQ ID NO: 13698 - DNA, 20 bp, Artificial Sequence
  Description of Artificial Sequence: Synthetic oligonucleotide
cagtagcacggcggtggcgg

SEQ ID NO: 13699 - DNA, 20 bp, Artificial Sequence
  Description of Artificial Sequence: Synthetic oligonucleotide
agtagcacggcggtggcggc

SEQ ID NO: 13700 - DNA, 20 bp, Artificial Sequence
  Description of Artificial Sequence: Synthetic oligonucleotide
gtagcacggcggtggcggcg

SEQ ID NO: 13701 - DNA, 20 bp, Artificial Sequence
  Description of Artificial Sequence: Synthetic oligonucleotide
tagcacggcggtggcggcgc

SEQ ID NO: 13702 - DNA, 20 bp, Artificial Sequence
  Description of Artificial Sequence: Synthetic oligonucleotide
agcacggcggtggcggcgca

SEQ ID NO: 13703 - DNA, 20 bp, Artificial Sequence
  Description of Artificial Sequence: Synthetic oligonucleotide
gcacggcggtggcggcgcag

SEQ ID NO: 13704 - DNA, 20 bp, Artificial Sequence
  Description of Artificial Sequence: Synthetic oligonucleotide
cacggcggtggcggcgcaga

SEQ ID NO: 13705 - DNA, 20 bp, Artificial Sequence
  Description of Artificial Sequence: Synthetic oligonucleotide
acggcggtggcggcgcagag

SEQ ID NO: 13706 - DNA, 20 bp, Artificial Sequence
  Description of Artificial Sequence: Synthetic oligonucleotide
cggcggtggcggcgcagagc

SEQ ID NO: 13707 - DNA, 20 bp, Artificial Sequence
  Description of Artificial Sequence: Synthetic oligonucleotide
ggcggtggcggcgcagagca

SEQ ID NO: 13708 - DNA, 20 bp, Artificial Sequence
  Description of Artificial Sequence: Synthetic oligonucleotide
gcggtggcggcgcagagcat

SEQ ID NO: 13709 - DNA, 20 bp, Artificial Sequence
  Description of Artificial Sequence: Synthetic oligonucleotide
cggtggcggcgcagagcatc

SEQ ID NO: 13710 - DNA, 20 bp, Artificial Sequence
  Description of Artificial Sequence: Synthetic oligonucleotide
ggtggcggcgcagagcatca

SEQ ID NO: 13711 - DNA, 20 bp, Artificial Sequence
  Description of Artificial Sequence: Synthetic oligonucleotide
gtggcggcgcagagcatcag

SEQ ID NO: 13712 - DNA, 20 bp, Artificial Sequence
  Description of Artificial Sequence: Synthetic oligonucleotide
tggcggcgcagagcatcagg

SEQ ID NO: 13713 - DNA, 20 bp, Artificial Sequence
  Description of Artificial Sequence: Synthetic oligonucleotide
ggcggcgcagagcatcaggg

SEQ ID NO: 13714 - DNA, 20 bp, Artificial Sequence
  Description of Artificial Sequence: Synthetic oligonucleotide
gcggcgcagagcatcagggc

SEQ ID NO: 13715 - DNA, 20 bp, Artificial Sequence
  Description of Artificial Sequence: Synthetic oligonucleotide
cggcgcagagcatcagggct

SEQ ID NO: 13716 - DNA, 20 bp, Artificial Sequence
  Description of Artificial Sequence: Synthetic oligonucleotide
ggcgcagagcatcagggctg

SEQ ID NO: 13717 - DNA, 20 bp, Artificial Sequence
  Description of Artificial Sequence: Synthetic oligonucleotide
gcgcagagcatcagggctgc

SEQ ID NO: 13718 - DNA, 20 bp, Artificial Sequence
  Description of Artificial Sequence: Synthetic oligonucleotide
cgcagagcatcagggctgcc

SEQ ID NO: 13719 - DNA, 20 bp, Artificial Sequence
  Description of Artificial Sequence: Synthetic oligonucleotide
gcagagcatcagggctgccc

SEQ ID NO: 13720 - DNA, 20 bp, Artificial Sequence
  Description of Artificial Sequence: Synthetic oligonucleotide
cagagcatcagggctgcccc

SEQ ID NO: 13721 - DNA, 20 bp, Artificial Sequence
  Description of Artificial Sequence: Synthetic oligonucleotide
agagcatcagggctgccccg

SEQ ID NO: 13722 - DNA, 20 bp, Artificial Sequence
  Description of Artificial Sequence: Synthetic oligonucleotide
gagcatcagggctgccccgg

SEQ ID NO: 13723 - DNA, 20 bp, Artificial Sequence
  Description of Artificial Sequence: Synthetic oligonucleotide
agcatcagggctgccccggc

SEQ ID NO: 13724 - DNA, 20 bp, Artificial Sequence
  Description of Artificial Sequence: Synthetic oligonucleotide
gcatcagggctgccccggcc

SEQ ID NO: 13725 - DNA, 20 bp, Artificial Sequence
  Description of Artificial Sequence: Synthetic oligonucleotide
catcagggctgccccggccg

SEQ ID NO: 13726 - DNA, 20 bp, Artificial Sequence
  Description of Artificial Sequence: Synthetic oligonucleotide
atcagggctgccccggccgt

SEQ ID NO: 13727 - DNA, 20 bp, Artificial Sequence
  Description of Artificial Sequence: Synthetic oligonucleotide
tcagggctgccccggccgtc

SEQ ID NO: 13728 - DNA, 20 bp, Artificial Sequence
  Description of Artificial Sequence: Synthetic oligonucleotide
cagggctgccccggccgtcg

SEQ ID NO: 13729 - DNA, 20 bp, Artificial Sequence
  Description of Artificial Sequence: Synthetic oligonucleotide
agggctgccccggccgtcgg

SEQ ID NO: 13730 - DNA, 20 bp, Artificial Sequence
  Description of Artificial Sequence: Synthetic oligonucleotide
gggctgccccggccgtcgga

SEQ ID NO: 13731 - DNA, 20 bp, Artificial Sequence
  Description of Artificial Sequence: Synthetic oligonucleotide
ggctgccccggccgtcggag

SEQ ID NO: 13732 - DNA, 20 bp, Artificial Sequence
  Description of Artificial Sequence: Synthetic oligonucleotide
gctgccccggccgtcggagc

SEQ ID NO: 13733 - DNA, 20 bp, Artificial Sequence
  Description of Artificial Sequence: Synthetic oligonucleotide
ctgccccggccgtcggagca

SEQ ID NO: 13734 - DNA, 20 bp, Artificial Sequence
  Description of Artificial Sequence: Synthetic oligonucleotide
tgccccggccgtcggagcac

SEQ ID NO: 13735 - DNA, 20 bp, Artificial Sequence
  Description of Artificial Sequence: Synthetic oligonucleotide
gccccggccgtcggagcacc

SEQ ID NO: 13736 - DNA, 20 bp, Artificial Sequence
  Description of Artificial Sequence: Synthetic oligonucleotide
ccccggccgtcggagcaccg

SEQ ID NO: 13737 - DNA, 20 bp, Artificial Sequence
  Description of Artificial Sequence: Synthetic oligonucleotide
cccggccgtcggagcaccgc

SEQ ID NO: 13738 - DNA, 20 bp, Artificial Sequence
  Description of Artificial Sequence: Synthetic oligonucleotide
ccggccgtcggagcaccgct

SEQ ID NO: 13739 - DNA, 20 bp, Artificial Sequence
  Description of Artificial Sequence: Synthetic oligonucleotide
cggccgtcggagcaccgctc

SEQ ID NO: 13740 - DNA, 20 bp, Artificial Sequence
  Description of Artificial Sequence: Synthetic oligonucleotide
ggccgtcggagcaccgctca

SEQ ID NO: 13741 - DNA, 20 bp, Artificial Sequence
  Description of Artificial Sequence: Synthetic oligonucleotide
gccgtcggagcaccgctcat

SEQ ID NO: 13742 - DNA, 20 bp, Artificial Sequence
  Description of Artificial Sequence: Synthetic oligonucleotide
ccgtcggagcaccgctcatc

SEQ ID NO: 13743 - DNA, 20 bp, Artificial Sequence
  Description of Artificial Sequence: Synthetic oligonucleotide
cgtcggagcaccgctcatcc

SEQ ID NO: 13744 - DNA, 20 bp, Artificial Sequence
  Description of Artificial Sequence: Synthetic oligonucleotide
gtcggagcaccgctcatcct

SEQ ID NO: 13745 - DNA, 20 bp, Artificial Sequence
  Description of Artificial Sequence: Synthetic oligonucleotide
tcggagcaccgctcatcctc

SEQ ID NO: 13746 - DNA, 20 bp, Artificial Sequence
  Description of Artificial Sequence: Synthetic oligonucleotide
cggagcaccgctcatcctct

SEQ ID NO: 13747 - DNA, 20 bp, Artificial Sequence
  Description of Artificial Sequence: Synthetic oligonucleotide
ggagcaccgctcatcctctt

SEQ ID NO: 13748 - DNA, 20 bp, Artificial Sequence
  Description of Artificial Sequence: Synthetic oligonucleotide
gagcaccgctcatcctctta

SEQ ID NO: 13749 - DNA, 20 bp, Artificial Sequence
  Description of Artificial Sequence: Synthetic oligonucleotide
agcaccgctcatcctcttag

SEQ ID NO: 13750 - DNA, 20 bp, Artificial Sequence
  Description of Artificial Sequence: Synthetic oligonucleotide
gcaccgctcatcctcttagg

SEQ ID NO: 13751 - DNA, 20 bp, Artificial Sequence
  Description of Artificial Sequence: Synthetic oligonucleotide
caccgctcatcctcttaggt

SEQ ID NO: 13752 - DNA, 20 bp, Artificial Sequence
  Description of Artificial Sequence: Synthetic oligonucleotide
accgctcatcctcttaggta

SEQ ID NO: 13753 - DNA, 20 bp, Artificial Sequence
  Description of Artificial Sequence: Synthetic oligonucleotide
ccgctcatcctcttaggtag

SEQ ID NO: 13754 - DNA, 20 bp, Artificial Sequence
  Description of Artificial Sequence: Synthetic oligonucleotide
cgctcatcctcttaggtagc

SEQ ID NO: 13755 - DNA, 20 bp, Artificial Sequence
  Description of Artificial Sequence: Synthetic oligonucleotide
gctcatcctcttaggtagcc

SEQ ID NO: 13756 - DNA, 20 bp, Artificial Sequence
  Description of Artificial Sequence: Synthetic oligonucleotide
ctcatcctcttaggtagcct

SEQ ID NO: 13757 - DNA, 20 bp, Artificial Sequence
  Description of Artificial Sequence: Synthetic oligonucleotide
tcatcctcttaggtagcctg

SEQ ID NO: 13758 - DNA, 20 bp, Artificial Sequence
  Description of Artificial Sequence: Synthetic oligonucleotide
catcctcttaggtagcctgg

SEQ ID NO: 13759 - DNA, 20 bp, Artificial Sequence
  Description of Artificial Sequence: Synthetic oligonucleotide
atcctcttaggtagcctggg

SEQ ID NO: 13760 - DNA, 20 bp, Artificial Sequence
  Description of Artificial Sequence: Synthetic oligonucleotide
tcctcttaggtagcctggga

SEQ ID NO: 13761 - DNA, 20 bp, Artificial Sequence
  Description of Artificial Sequence: Synthetic oligonucleotide
cctcttaggtagcctgggag

SEQ ID NO: 13762 - DNA, 20 bp, Artificial Sequence
  Description of Artificial Sequence: Synthetic oligonucleotide
ctcttaggtagcctgggagc

SEQ ID NO: 13763 - DNA, 20 bp, Artificial Sequence
  Description of Artificial Sequence: Synthetic oligonucleotide
tcttaggtagcctgggagcg

SEQ ID NO: 13764 - DNA, 20 bp, Artificial Sequence
  Description of Artificial Sequence: Synthetic oligonucleotide
cttaggtagcctgggagcgg

SEQ ID NO: 13765 - DNA, 20 bp, Artificial Sequence
  Description of Artificial Sequence: Synthetic oligonucleotide
ttaggtagcctgggagcggg

SEQ ID NO: 13766 - DNA, 20 bp, Artificial Sequence
  Description of Artificial Sequence: Synthetic oligonucleotide
taggtagcctgggagcgggg

SEQ ID NO: 13767 - DNA, 20 bp, Artificial Sequence
  Description of Artificial Sequence: Synthetic oligonucleotide
aggtagcctgggagcgggga

SEQ ID NO: 13768 - DNA, 20 bp, Artificial Sequence
  Description of Artificial Sequence: Synthetic oligonucleotide
ggtagcctgggagcggggat

SEQ ID NO: 13769 - DNA, 20 bp, Artificial Sequence
  Description of Artificial Sequence: Synthetic oligonucleotide
gtagcctgggagcggggatt

SEQ ID NO: 13770 - DNA, 20 bp, Artificial Sequence
  Description of Artificial Sequence: Synthetic oligonucleotide
tagcctgggagcggggattc

SEQ ID NO: 13771 - DNA, 20 bp, Artificial Sequence
  Description of Artificial Sequence: Synthetic oligonucleotide
agcctgggagcggggattcg

SEQ ID NO: 13772 - DNA, 20 bp, Artificial Sequence
  Description of Artificial Sequence: Synthetic oligonucleotide
gcctgggagcggggattcgg

SEQ ID NO: 13773 - DNA, 20 bp, Artificial Sequence
  Description of Artificial Sequence: Synthetic oligonucleotide
cctgggagcggggattcggg

SEQ ID NO: 13774 - DNA, 20 bp, Artificial Sequence
  Description of Artificial Sequence: Synthetic oligonucleotide
ctgggagcggggattcgggg

SEQ ID NO: 13775 - DNA, 20 bp, Artificial Sequence
  Description of Artificial Sequence: Synthetic oligonucleotide
tgggagcggggattcgggga

SEQ ID NO: 13776 - DNA, 20 bp, Artificial Sequence
  Description of Artificial Sequence: Synthetic oligonucleotide
gggagcggggattcggggac

SEQ ID NO: 13777 - DNA, 20 bp, Artificial Sequence
  Description of Artificial Sequence: Synthetic oligonucleotide
ggagcggggattcggggact

SEQ ID NO: 13778 - DNA, 20 bp, Artificial Sequence
  Description of Artificial Sequence: Synthetic oligonucleotide
gagcggggattcggggactc

SEQ ID NO: 13779 - DNA, 20 bp, Artificial Sequence
  Description of Artificial Sequence: Synthetic oligonucleotide
agcggggattcggggactct

SEQ ID NO: 13780 - DNA, 20 bp, Artificial Sequence
  Description of Artificial Sequence: Synthetic oligonucleotide
gcggggattcggggactctc

SEQ ID NO: 13781 - DNA, 20 bp, Artificial Sequence
  Description of Artificial Sequence: Synthetic oligonucleotide
cggggattcggggactctcg

SEQ ID NO: 13782 - DNA, 20 bp, Artificial Sequence
  Description of Artificial Sequence: Synthetic oligonucleotide
ggggattcggggactctcgg

SEQ ID NO: 13783 - DNA, 20 bp, Artificial Sequence
  Description of Artificial Sequence: Synthetic oligonucleotide
gggattcggggactctcggg

SEQ ID NO: 13784 - DNA, 20 bp, Artificial Sequence
  Description of Artificial Sequence: Synthetic oligonucleotide
ggattcggggactctcgggg

SEQ ID NO: 13785 - DNA, 20 bp, Artificial Sequence
  Description of Artificial Sequence: Synthetic oligonucleotide
gattcggggactctcgggga

SEQ ID NO: 13786 - DNA, 20 bp, Artificial Sequence
  Description of Artificial Sequence: Synthetic oligonucleotide
attcggggactctcggggac

SEQ ID NO: 13787 - DNA, 20 bp, Artificial Sequence
  Description of Artificial Sequence: Synthetic oligonucleotide
ttcggggactctcggggacg

SEQ ID NO: 13788 - DNA, 20 bp, Artificial Sequence
  Description of Artificial Sequence: Synthetic oligonucleotide
tcggggactctcggggacgt

SEQ ID NO: 13789 - DNA, 20 bp, Artificial Sequence
  Description of Artificial Sequence: Synthetic oligonucleotide
cggggactctcggggacgtt

SEQ ID NO: 13790 - DNA, 20 bp, Artificial Sequence
  Description of Artificial Sequence: Synthetic oligonucleotide
ggggactctcggggacgttg

SEQ ID NO: 13791 - DNA, 20 bp, Artificial Sequence
  Description of Artificial Sequence: Synthetic oligonucleotide
gggactctcggggacgttgg

SEQ ID NO: 13792 - DNA, 20 bp, Artificial Sequence
  Description of Artificial Sequence: Synthetic oligonucleotide
ggactctcggggacgttggg

SEQ ID NO: 13793 - DNA, 20 bp, Artificial Sequence
  Description of Artificial Sequence: Synthetic oligonucleotide
gactctcggggacgttgggg

SEQ ID NO: 13794 - DNA, 20 bp, Artificial Sequence
  Description of Artificial Sequence: Synthetic oligonucleotide
actctcggggacgttggggt

SEQ ID NO: 13795 - DNA, 20 bp, Artificial Sequence
  Description of Artificial Sequence: Synthetic oligonucleotide
ctctcggggacgttggggtt

SEQ ID NO: 13796 - DNA, 20 bp, Artificial Sequence
  Description of Artificial Sequence: Synthetic oligonucleotide
tctcggggacgttggggttc

SEQ ID NO: 13797 - DNA, 20 bp, Artificial Sequence
  Description of Artificial Sequence: Synthetic oligonucleotide
ctcggggacgttggggttcc

SEQ ID NO: 13798 - DNA, 20 bp, Artificial Sequence
  Description of Artificial Sequence: Synthetic oligonucleotide
tcggggacgttggggttcca

SEQ ID NO: 13799 - DNA, 20 bp, Artificial Sequence
  Description of Artificial Sequence: Synthetic oligonucleotide
cggggacgttggggttccag

SEQ ID NO: 13800 - DNA, 20 bp, Artificial Sequence
  Description of Artificial Sequence: Synthetic oligonucleotide
ggggacgttggggttccagg

SEQ ID NO: 13801 - DNA, 20 bp, Artificial Sequence
  Description of Artificial Sequence: Synthetic oligonucleotide
gggacgttggggttccaggt

SEQ ID NO: 13802 - DNA, 20 bp, Artificial Sequence
  Description of Artificial Sequence: Synthetic oligonucleotide
ggacgttggggttccaggtg

SEQ ID NO: 13803 - DNA, 20 bp, Artificial Sequence
  Description of Artificial Sequence: Synthetic oligonucleotide
gacgttggggttccaggtgc

SEQ ID NO: 13804 - DNA, 20 bp, Artificial Sequence
  Description of Artificial Sequence: Synthetic oligonucleotide
acgttggggttccaggtgcg

SEQ ID NO: 13805 - DNA, 20 bp, Artificial Sequence
  Description of Artificial Sequence: Synthetic oligonucleotide
cgttggggttccaggtgcga

SEQ ID NO: 13806 - DNA, 20 bp, Artificial Sequence
  Description of Artificial Sequence: Synthetic oligonucleotide
gttggggttccaggtgcgag

SEQ ID NO: 13807 - DNA, 20 bp, Artificial Sequence
  Description of Artificial Sequence: Synthetic oligonucleotide
ttggggttccaggtgcgagg

SEQ ID NO: 13808 - DNA, 20 bp, Artificial Sequence
  Description of Artificial Sequence: Synthetic oligonucleotide
tggggttccaggtgcgagga

SEQ ID NO: 13809 - DNA, 20 bp, Artificial Sequence
  Description of Artificial Sequence: Synthetic oligonucleotide
ggggttccaggtgcgaggac

SEQ ID NO: 13810 - DNA, 20 bp, Artificial Sequence
  Description of Artificial Sequence: Synthetic oligonucleotide
gggttccaggtgcgaggact

SEQ ID NO: 13811 - DNA, 20 bp, Artificial Sequence
  Description of Artificial Sequence: Synthetic oligonucleotide
ggttccaggtgcgaggactg

SEQ ID NO: 13812 - DNA, 20 bp, Artificial Sequence
  Description of Artificial Sequence: Synthetic oligonucleotide
gttccaggtgcgaggactgg

SEQ ID NO: 13813 - DNA, 20 bp, Artificial Sequence
  Description of Artificial Sequence: Synthetic oligonucleotide
ttccaggtgcgaggactgga

SEQ ID NO: 13814 - DNA, 20 bp, Artificial Sequence
  Description of Artificial Sequence: Synthetic oligonucleotide
tccaggtgcgaggactggag

SEQ ID NO: 13815 - DNA, 20 bp, Artificial Sequence
  Description of Artificial Sequence: Synthetic oligonucleotide
ccaggtgcgaggactggaga

SEQ ID NO: 13816 - DNA, 20 bp, Artificial Sequence
  Description of Artificial Sequence: Synthetic oligonucleotide
caggtgcgaggactggagac

SEQ ID NO: 13817 - DNA, 20 bp, Artificial Sequence
  Description of Artificial Sequence: Synthetic oligonucleotide
aggtgcgaggactggagacg

SEQ ID NO: 13818 - DNA, 20 bp, Artificial Sequence
  Description of Artificial Sequence: Synthetic oligonucleotide
ggtgcgaggactggagacgc

SEQ ID NO: 13819 - DNA, 20 bp, Artificial Sequence
  Description of Artificial Sequence: Synthetic oligonucleotide
gtgcgaggactggagacgcg

SEQ ID NO: 13820 - DNA, 20 bp, Artificial Sequence
  Description of Artificial Sequence: Synthetic oligonucleotide
tgcgaggactggagacgcgg

SEQ ID NO: 13821 - DNA, 20 bp, Artificial Sequence
  Description of Artificial Sequence: Synthetic oligonucleotide
gcgaggactggagacgcgga

SEQ ID NO: 13822 - DNA, 20 bp, Artificial Sequence
  Description of Artificial Sequence: Synthetic oligonucleotide
cgaggactggagacgcggag

SEQ ID NO: 13823 - DNA, 20 bp, Artificial Sequence
  Description of Artificial Sequence: Synthetic oligonucleotide
gaggactggagacgcggagg

SEQ ID NO: 13824 - DNA, 20 bp, Artificial Sequence
  Description of Artificial Sequence: Synthetic oligonucleotide
aggactggagacgcggagga

SEQ ID NO: 13825 - DNA, 20 bp, Artificial Sequence
  Description of Artificial Sequence: Synthetic oligonucleotide
ggactggagacgcggaggac

SEQ ID NO: 13826 - DNA, 20 bp, Artificial Sequence
  Description of Artificial Sequence: Synthetic oligonucleotide
gactggagacgcggaggacc

SEQ ID NO: 13827 - DNA, 20 bp, Artificial Sequence
  Description of Artificial Sequence: Synthetic oligonucleotide
actggagacgcggaggaccg

SEQ ID NO: 13828 - DNA, 20 bp, Artificial Sequence
  Description of Artificial Sequence: Synthetic oligonucleotide
ctggagacgcggaggaccgg

SEQ ID NO: 13829 - DNA, 20 bp, Artificial Sequence
  Description of Artificial Sequence: Synthetic oligonucleotide
tggagacgcggaggaccggg

SEQ ID NO: 13830 - DNA, 20 bp, Artificial Sequence
  Description of Artificial Sequence: Synthetic oligonucleotide
ggagacgcggaggaccgggg

SEQ ID NO: 13831 - DNA, 20 bp, Artificial Sequence
  Description of Artificial Sequence: Synthetic oligonucleotide
gagacgcggaggaccggggg

SEQ ID NO: 13832 - DNA, 20 bp, Artificial Sequence
  Description of Artificial Sequence: Synthetic oligonucleotide
agacgcggaggaccgggggt

SEQ ID NO: 13833 - DNA, 20 bp, Artificial Sequence
  Description of Artificial Sequence: Synthetic oligonucleotide
gacgcggaggaccgggggta

SEQ ID NO: 13834 - DNA, 20 bp, Artificial Sequence
  Description of Artificial Sequence: Synthetic oligonucleotide
acgcggaggaccgggggtaa

SEQ ID NO: 13835 - DNA, 20 bp, Artificial Sequence
  Description of Artificial Sequence: Synthetic oligonucleotide
cgcggaggaccgggggtaag

SEQ ID NO: 13836 - DNA, 20 bp, Artificial Sequence
  Description of Artificial Sequence: Synthetic oligonucleotide
gcggaggaccgggggtaaga

SEQ ID NO: 13837 - DNA, 20 bp, Artificial Sequence
  Description of Artificial Sequence: Synthetic oligonucleotide
cggaggaccgggggtaagac

SEQ ID NO: 13838 - DNA, 20 bp, Artificial Sequence
  Description of Artificial Sequence: Synthetic oligonucleotide
ggaggaccgggggtaagacc

SEQ ID NO: 13839 - DNA, 20 bp, Artificial Sequence
  Description of Artificial Sequence: Synthetic oligonucleotide
gaggaccgggggtaagaccc

SEQ ID NO: 13840 - DNA, 20 bp, Artificial Sequence
  Description of Artificial Sequence: Synthetic oligonucleotide
aggaccgggggtaagacccg

SEQ ID NO: 13841 - DNA, 20 bp, Artificial Sequence
  Description of Artificial Sequence: Synthetic oligonucleotide
ggaccgggggtaagacccgc

SEQ ID NO: 13842 - DNA, 20 bp, Artificial Sequence
  Description of Artificial Sequence: Synthetic oligonucleotide
gaccgggggtaagacccgct

SEQ ID NO: 13843 - DNA, 20 bp, Artificial Sequence
  Description of Artificial Sequence: Synthetic oligonucleotide
accgggggtaagacccgctt

SEQ ID NO: 13844 - DNA, 20 bp, Artificial Sequence
  Description of Artificial Sequence: Synthetic oligonucleotide
ccgggggtaagacccgcttg

SEQ ID NO: 13845 - DNA, 20 bp, Artificial Sequence
  Description of Artificial Sequence: Synthetic oligonucleotide
cgggggtaagacccgcttgg

SEQ ID NO: 13846 - DNA, 20 bp, Artificial Sequence
  Description of Artificial Sequence: Synthetic oligonucleotide
gggggtaagacccgcttggt

SEQ ID NO: 13847 - DNA, 20 bp, Artificial Sequence
  Description of Artificial Sequence: Synthetic oligonucleotide
ggggtaagacccgcttggtt

SEQ ID NO: 13848 - DNA, 20 bp, Artificial Sequence
  Description of Artificial Sequence: Synthetic oligonucleotide
gggtaagacccgcttggttg

SEQ ID NO: 13849 - DNA, 20 bp, Artificial Sequence
  Description of Artificial Sequence: Synthetic oligonucleotide
ggtaagacccgcttggttgc

SEQ ID NO: 13850 - DNA, 20 bp, Artificial Sequence
  Description of Artificial Sequence: Synthetic oligonucleotide
gtaagacccgcttggttgca

SEQ ID NO: 13851 - DNA, 20 bp, Artificial Sequence
  Description of Artificial Sequence: Synthetic oligonucleotide
taagacccgcttggttgcag

SEQ ID NO: 13852 - DNA, 20 bp, Artificial Sequence
  Description of Artificial Sequence: Synthetic oligonucleotide
aagacccgcttggttgcaga

SEQ ID NO: 13853 - DNA, 20 bp, Artificial Sequence
  Description of Artificial Sequence: Synthetic oligonucleotide
agacccgcttggttgcagaa

SEQ ID NO: 13854 - DNA, 20 bp, Artificial Sequence
  Description of Artificial Sequence: Synthetic oligonucleotide
gacccgcttggttgcagaag

SEQ ID NO: 13855 - DNA, 20 bp, Artificial Sequence
  Description of Artificial Sequence: Synthetic oligonucleotide
acccgcttggttgcagaagc

SEQ ID NO: 13856 - DNA, 20 bp, Artificial Sequence
  Description of Artificial Sequence: Synthetic oligonucleotide
cccgcttggttgcagaagcc

SEQ ID NO: 13857 - DNA, 20 bp, Artificial Sequence
  Description of Artificial Sequence: Synthetic oligonucleotide
ccgcttggttgcagaagccg

SEQ ID NO: 13858 - DNA, 20 bp, Artificial Sequence
  Description of Artificial Sequence: Synthetic oligonucleotide
cgcttggttgcagaagccgc

SEQ ID NO: 13859 - DNA, 20 bp, Artificial Sequence
  Description of Artificial Sequence: Synthetic oligonucleotide
gcttggttgcagaagccgct

SEQ ID NO: 13860 - DNA, 20 bp, Artificial Sequence
  Description of Artificial Sequence: Synthetic oligonucleotide
cttggttgcagaagccgctg

SEQ ID NO: 13861 - DNA, 20 bp, Artificial Sequence
  Description of Artificial Sequence: Synthetic oligonucleotide
ttggttgcagaagccgctgg

SEQ ID NO: 13862 - DNA, 20 bp, Artificial Sequence
  Description of Artificial Sequence: Synthetic oligonucleotide
tggttgcagaagccgctgga

SEQ ID NO: 13863 - DNA, 20 bp, Artificial Sequence
  Description of Artificial Sequence: Synthetic oligonucleotide
ggttgcagaagccgctggaa

SEQ ID NO: 13864 - DNA, 20 bp, Artificial Sequence
  Description of Artificial Sequence: Synthetic oligonucleotide
gttgcagaagccgctggaaa

SEQ ID NO: 13865 - DNA, 20 bp, Artificial Sequence
  Description of Artificial Sequence: Synthetic oligonucleotide
ttgcagaagccgctggaaag

SEQ ID NO: 13866 - DNA, 20 bp, Artificial Sequence
  Description of Artificial Sequence: Synthetic oligonucleotide
tgcagaagccgctggaaaga

SEQ ID NO: 13867 - DNA, 20 bp, Artificial Sequence
  Description of Artificial Sequence: Synthetic oligonucleotide
gcagaagccgctggaaagaa

SEQ ID NO: 13868 - DNA, 20 bp, Artificial Sequence
  Description of Artificial Sequence: Synthetic oligonucleotide
cagaagccgctggaaagaat

SEQ ID NO: 13869 - DNA, 20 bp, Artificial Sequence
  Description of Artificial Sequence: Synthetic oligonucleotide
agaagccgctggaaagaatc

SEQ ID NO: 13870 - DNA, 20 bp, Artificial Sequence
  Description of Artificial Sequence: Synthetic oligonucleotide
gaagccgctggaaagaatcg

SEQ ID NO: 13871 - DNA, 20 bp, Artificial Sequence
  Description of Artificial Sequence: Synthetic oligonucleotide
aagccgctggaaagaatcgg

SEQ ID NO: 13872 - DNA, 20 bp, Artificial Sequence
  Description of Artificial Sequence: Synthetic oligonucleotide
agccgctggaaagaatcgga

SEQ ID NO: 13873 - DNA, 20 bp, Artificial Sequence
  Description of Artificial Sequence: Synthetic oligonucleotide
gccgctggaaagaatcggat

SEQ ID NO: 13874 - DNA, 20 bp, Artificial Sequence
  Description of Artificial Sequence: Synthetic oligonucleotide
ccgctggaaagaatcggatc

SEQ ID NO: 13875 - DNA, 20 bp, Artificial Sequence
  Description of Artificial Sequence: Synthetic oligonucleotide
cgctggaaagaatcggatca

SEQ ID NO: 13876 - DNA, 20 bp, Artificial Sequence
  Description of Artificial Sequence: Synthetic oligonucleotide
gctggaaagaatcggatcac

SEQ ID NO: 13877 - DNA, 20 bp, Artificial Sequence
  Description of Artificial Sequence: Synthetic oligonucleotide
ctggaaagaatcggatcaca

SEQ ID NO: 13878 - DNA, 20 bp, Artificial Sequence
  Description of Artificial Sequence: Synthetic oligonucleotide
tggaaagaatcggatcacag

SEQ ID NO: 13879 - DNA, 20 bp, Artificial Sequence
  Description of Artificial Sequence: Synthetic oligonucleotide
ggaaagaatcggatcacagt

SEQ ID NO: 13880 - DNA, 20 bp, Artificial Sequence
  Description of Artificial Sequence: Synthetic oligonucleotide
gaaagaatcggatcacagtc

SEQ ID NO: 13881 - DNA, 20 bp, Artificial Sequence
  Description of Artificial Sequence: Synthetic oligonucleotide
aaagaatcggatcacagtcg

SEQ ID NO: 13882 - DNA, 20 bp, Artificial Sequence
  Description of Artificial Sequence: Synthetic oligonucleotide
aagaatcggatcacagtcgt

SEQ ID NO: 13883 - DNA, 20 bp, Artificial Sequence
  Description of Artificial Sequence: Synthetic oligonucleotide
agaatcggatcacagtcgtg

SEQ ID NO: 13884 - DNA, 20 bp, Artificial Sequence
  Description of Artificial Sequence: Synthetic oligonucleotide
gaatcggatcacagtcgtgt

SEQ ID NO: 13885 - DNA, 20 bp, Artificial Sequence
  Description of Artificial Sequence: Synthetic oligonucleotide
aatcggatcacagtcgtgtg

SEQ ID NO: 13886 - DNA, 20 bp, Artificial Sequence
  Description of Artificial Sequence: Synthetic oligonucleotide
atcggatcacagtcgtgtga

SEQ ID NO: 13887 - DNA, 20 bp, Artificial Sequence
  Description of Artificial Sequence: Synthetic oligonucleotide
tcggatcacagtcgtgtgag

SEQ ID NO: 13888 - DNA, 20 bp, Artificial Sequence
  Description of Artificial Sequence: Synthetic oligonucleotide
cggatcacagtcgtgtgagg

SEQ ID NO: 13889 - DNA, 20 bp, Artificial Sequence
  Description of Artificial Sequence: Synthetic oligonucleotide
ggatcacagtcgtgtgagga

SEQ ID NO: 13890 - DNA, 20 bp, Artificial Sequence
  Description of Artificial Sequence: Synthetic oligonucleotide
gatcacagtcgtgtgaggat

SEQ ID NO: 13891 - DNA, 20 bp, Artificial Sequence
  Description of Artificial Sequence: Synthetic oligonucleotide
atcacagtcgtgtgaggatc

SEQ ID NO: 13892 - DNA, 20 bp, Artificial Sequence
  Description of Artificial Sequence: Synthetic oligonucleotide
tcacagtcgtgtgaggatcc

SEQ ID NO: 13893 - DNA, 20 bp, Artificial Sequence
  Description of Artificial Sequence: Synthetic oligonucleotide
cacagtcgtgtgaggatccg

SEQ ID NO: 13894 - DNA, 20 bp, Artificial Sequence
  Description of Artificial Sequence: Synthetic oligonucleotide
acagtcgtgtgaggatccgc

SEQ ID NO: 13895 - DNA, 20 bp, Artificial Sequence
  Description of Artificial Sequence: Synthetic oligonucleotide
cagtcgtgtgaggatccgct

SEQ ID NO: 13896 - DNA, 20 bp, Artificial Sequence
  Description of Artificial Sequence: Synthetic oligonucleotide
agtcgtgtgaggatccgctc

SEQ ID NO: 13897 - DNA, 20 bp, Artificial Sequence
  Description of Artificial Sequence: Synthetic oligonucleotide
gtcgtgtgaggatccgctca

SEQ ID NO: 13898 - DNA, 20 bp, Artificial Sequence
  Description of Artificial Sequence: Synthetic oligonucleotide
tcgtgtgaggatccgctcag

SEQ ID NO: 13899 - DNA, 20 bp, Artificial Sequence
  Description of Artificial Sequence: Synthetic oligonucleotide
cgtgtgaggatccgctcagc

SEQ ID NO: 13900 - DNA, 20 bp, Artificial Sequence
  Description of Artificial Sequence: Synthetic oligonucleotide
gtgtgaggatccgctcagct

SEQ ID NO: 13901 - DNA, 20 bp, Artificial Sequence
  Description of Artificial Sequence: Synthetic oligonucleotide
tgtgaggatccgctcagctc

SEQ ID NO: 13902 - DNA, 20 bp, Artificial Sequence
  Description of Artificial Sequence: Synthetic oligonucleotide
gtgaggatccgctcagctcg

SEQ ID NO: 13903 - DNA, 20 bp, Artificial Sequence
  Description of Artificial Sequence: Synthetic oligonucleotide
tgaggatccgctcagctcgg

SEQ ID NO: 13904 - DNA, 20 bp, Artificial Sequence
  Description of Artificial Sequence: Synthetic oligonucleotide
gaggatccgctcagctcggc

SEQ ID NO: 13905 - DNA, 20 bp, Artificial Sequence
  Description of Artificial Sequence: Synthetic oligonucleotide
aggatccgctcagctcggct

SEQ ID NO: 13906 - DNA, 20 bp, Artificial Sequence
  Description of Artificial Sequence: Synthetic oligonucleotide
ggatccgctcagctcggctt

SEQ ID NO: 13907 - DNA, 20 bp, Artificial Sequence
  Description of Artificial Sequence: Synthetic oligonucleotide
gatccgctcagctcggcttc

SEQ ID NO: 13908 - DNA, 20 bp, Artificial Sequence
  Description of Artificial Sequence: Synthetic oligonucleotide
atccgctcagctcggcttct

SEQ ID NO: 13909 - DNA, 20 bp, Artificial Sequence
  Description of Artificial Sequence: Synthetic oligonucleotide
tccgctcagctcggcttctc

SEQ ID NO: 13910 - DNA, 20 bp, Artificial Sequence
  Description of Artificial Sequence: Synthetic oligonucleotide
ccgctcagctcggcttctcc

SEQ ID NO: 13911 - DNA, 20 bp, Artificial Sequence
  Description of Artificial Sequence: Synthetic oligonucleotide
cgctcagctcggcttctccc

SEQ ID NO: 13912 - DNA, 20 bp, Artificial Sequence
  Description of Artificial Sequence: Synthetic oligonucleotide
gctcagctcggcttctcccc

SEQ ID NO: 13913 - DNA, 20 bp, Artificial Sequence
  Description of Artificial Sequence: Synthetic oligonucleotide
ctcagctcggcttctccccg

SEQ ID NO: 13914 - DNA, 20 bp, Artificial Sequence
  Description of Artificial Sequence: Synthetic oligonucleotide
tcagctcggcttctccccgc

SEQ ID NO: 13915 - DNA, 20 bp, Artificial Sequence
  Description of Artificial Sequence: Synthetic oligonucleotide
cagctcggcttctccccgcc

SEQ ID NO: 13916 - DNA, 20 bp, Artificial Sequence
  Description of Artificial Sequence: Synthetic oligonucleotide
agctcggcttctccccgccg

SEQ ID NO: 13917 - DNA, 20 bp, Artificial Sequence
  Description of Artificial Sequence: Synthetic oligonucleotide
gctcggcttctccccgccgc

SEQ ID NO: 13918 - DNA, 20 bp, Artificial Sequence
  Description of Artificial Sequence: Synthetic oligonucleotide
ctcggcttctccccgccgcg

SEQ ID NO: 13919 - DNA, 20 bp, Artificial Sequence
  Description of Artificial Sequence: Synthetic oligonucleotide
tcggcttctccccgccgcgc

SEQ ID NO: 13920 - DNA, 20 bp, Artificial Sequence
  Description of Artificial Sequence: Synthetic oligonucleotide
cggcttctccccgccgcgcc

SEQ ID NO: 13921 - DNA, 20 bp, Artificial Sequence
  Description of Artificial Sequence: Synthetic oligonucleotide
ggcttctccccgccgcgccc

SEQ ID NO: 13922 - DNA, 20 bp, Artificial Sequence
  Description of Artificial Sequence: Synthetic oligonucleotide
gcttctccccgccgcgcccg

SEQ ID NO: 13923 - DNA, 20 bp, Artificial Sequence
  Description of Artificial Sequence: Synthetic oligonucleotide
cttctccccgccgcgcccga

SEQ ID NO: 13924 - DNA, 20 bp, Artificial Sequence
  Description of Artificial Sequence: Synthetic oligonucleotide
ttctccccgccgcgcccgag

SEQ ID NO: 13925 - DNA, 20 bp, Artificial Sequence
  Description of Artificial Sequence: Synthetic oligonucleotide
tctccccgccgcgcccgagg

SEQ ID NO: 13926 - DNA, 20 bp, Artificial Sequence
  Description of Artificial Sequence: Synthetic oligonucleotide
ctccccgccgcgcccgagga

SEQ ID NO: 13927 - DNA, 20 bp, Artificial Sequence
  Description of Artificial Sequence: Synthetic oligonucleotide
tccccgccgcgcccgaggac

SEQ ID NO: 13928 - DNA, 20 bp, Artificial Sequence
  Description of Artificial Sequence: Synthetic oligonucleotide
ccccgccgcgcccgaggacg

SEQ ID NO: 13929 - DNA, 20 bp, Artificial Sequence
  Description of Artificial Sequence: Synthetic oligonucleotide
cccgccgcgcccgaggacgg

SEQ ID NO: 13930 - DNA, 20 bp, Artificial Sequence
  Description of Artificial Sequence: Synthetic oligonucleotide
ccgccgcgcccgaggacggt

SEQ ID NO: 13931 - DNA, 20 bp, Artificial Sequence
  Description of Artificial Sequence: Synthetic oligonucleotide
cgccgcgcccgaggacggtt

SEQ ID NO: 13932 - DNA, 20 bp, Artificial Sequence
  Description of Artificial Sequence: Synthetic oligonucleotide
gccgcgcccgaggacggttt

SEQ ID NO: 13933 - DNA, 20 bp, Artificial Sequence
  Description of Artificial Sequence: Synthetic oligonucleotide
ccgcgcccgaggacggtttt

SEQ ID NO: 13934 - DNA, 20 bp, Artificial Sequence
  Description of Artificial Sequence: Synthetic oligonucleotide
cgcgcccgaggacggttttt

SEQ ID NO: 13935 - DNA, 1872 bp, Homo sapiens
agaagccgagctgagcggatcctcacacgactgtgatccgattctttccagcggcttctgcaaccaagcgggtcttacccccggtcctccgcgtctccagtcctcgcacctggaaccccaacgtccccgagagtccccgaatccccgctcccaggctacctaagaggatgagcggtgctccgacggccggggcagccctgatgctctgcgccgccaccgccgtgctactgagcgctcagggcggacccgtgcagtccaagtcgccgcgctttgcgtcctgggacgagatgaatgtcctggcgcacggactcctgcagctcggccaggggctgcgcgaacacgcggagcgcacccgcagtcagctgagcgcgctggagcggcgcctgagcgcgtgcgggtccgcctgtcagggaaccgaggggtccaccgacctcccgttagcccctgagagccgggtggaccctgaggtccttcacagcctgcagacacaactcaaggctcagaacagcaggatccagcaactcttccacaaggtggcccagcagcagcggcacctggagaagcagcacctgcgaattcagcatctgcaaagccagtttggcctcctggaccacaagcacctagaccatgaggtggccaagcctgcccgaagaaagaggctgcccgagatggcccagccagttgacccggctcacaatgtcagccgcctgcaccggctgcccagggattgccaggagctgttccaggttggggagaggcagagtggactatttgaaatccagcctcaggggtctccgccatttttggtgaactgcaagatgacctcagatggaggctggacagtaattcagaggcgccacgatggctcagtggacttcaaccggccctgggaagcctacaaggcggggtttggggatccccacggcgagttctggctgggtctggagaaggtgcatagcatcacgggggaccgcaacagccgcctggccgtgcagctgcgggactgggatggcaacgccgagttgctgcagttctccgtgcacctgggtggcgaggacacggcctatagcctgcagctcactgcacccgtggccggccagctgggcgccaccaccgtcccacccagcggcctctccgtacccttctccacttgggaccaggatcacgacctccgcagggacaagaactgcgccaagagcctctctggaggctggtggtttggcacctgcagccattccaacctcaacggccagtacttccgctccatcccacagcagcggcagaagcttaagaagggaatcttctggaagacctggcggggccgctactacccgctgcaggccaccaccatgttgatccagcccatggcagcagaggcagcctcctagcgtcctggctgggcctggtcccaggcccacgaaagacggtgactcttggctctgcccgaggatgtggccgttccctgcctgggcaggggctccaaggaggggccatctggaaacttgtggacagagaagaagaccacgactggagaagccccctttctgagtgcaggggggctgcatgcgttgcctcctgagatcgaggctgcaggatatgctcagactctagaggcgtggaccaaggggcatggagcttcactccttgctggccagggagttggggactcagagggaccacttggggccagccagactggcctcaatggcggactcagtcacattgactgacggggaccagggcttgtgtgggtcgagagcgccctcatggtgctggtgctgttgtgtgtaggtcccctggggacacaagcaggcgccaatggtatctgggcggagctcacagagttcttggaataaaagcaacctcagaaca

SEQ ID NO: 13936 - DNA, 10245 bp, Homo sapiens
aaaaaccgtcctcgggcgcggcggggagaagccgagctgagcggatcctcacacgactgtgatccgattctttccagcggcttctgcaaccaagcgggtcttacccccggtcctccgcgtctccagtcctcgcacctggaaccccaacgtccccgagagtccccgaatccccgctcccaggctacctaagaggatgagcggtgctccgacggccggggcagccctgatgctctgcgccgccaccgccgtgctactgagcgctcagggcggacccgtgcagtccaagtcgccgcgctttgcgtcctgggacgagatgaatgtcctggcgcacggactcctgcagctcggccaggggctgcgcgaacacgcggagcgcacccgcagtcagctgagcgcgctggagcggcgcctgagcgcgtgcgggtccgcctgtcagggaaccgaggggtccaccgacctcccgttagcccctgagagccgggtggaccctgaggtccttcacagcctgcaggtacgtgtccccagggctggttctccgcgcccctagtggctctcctggcttggaagggtatggacaggagtggggcgtgggggcggggtgcgcaactgtggctccctgggcttccctgcgtcaagggatgggctccccccttaggaagccgaggagggaggttcgctcaaggccaggaattcaagaccacctaaagcaaaatagcgagacccccgtctcttctacacacacacacacacacacacaaaataaataaaataaaataaaataaatataaaattaaaaaacgaccgggcgcagtggctcacggagcctccacctgctgtcgagactagcctggccaacatggagaaacctcgtctctactaaaaatacaaaaaattagcctggcatggtgtgcatgcctgtaatcccagctacttgggaggctgaggcaggagaatctcttgaacccgggaggcagaggttgcagtgagccgagatcgcagcactgcactccagcctgggcaacagagtgagactcctcaaaaaaataatagcgataaaataaaaataaagccaggtgcggtgactcacgcttgtagtcccagcactttgggagggcgaggccagtggatcacctgaggtcaggagttcaagaccagcctgaccaacacagtgaaaccccgtctctactaaaaatacaaaaattagctgggtgtggtggtgggcgcctgtaatcccagctactggggaggctgaggcaggagaacctcttgaacccgggaggcggaggttgcagtgagccgggatcatgccattgcactccagcctgggcgacagagctcgactccatctcaaaataataataataataaataaaataaaatacaaatacaaaaattagccaggtgtggtggcagctacttgggaggctgagacacaagaatcacttgagtctgggaggcagaggttgcagtgagccaagattgcgccactgcactccaacctgggtgacagagcgagactctgtctgaaaaaataaaaaataagccaggcatagagctgcatgactgtagtcccagctacacaggaggctgaaaacaggaggatcgcctgaccccaggagttggaggctgcagtgagctgtgacagcaccactgcactccagcctgggcgagagaacgagaccccgtcattgggaaaaaaaagaaaaaagaaagactcccttgcctggcctcagcggatggagatttggaaggatggatgagtggatgaattaagaggttggggtaggcaagctgggtcctcaccaaggttttcacccctccccagacacaactcaaggctcagaacagcaggatccagcaactcttccacaaggtggcccagcagcagcggcacctggagaagcagcacctgcgaattcagcatctgcaaagccaggtaaccctaggatcaagggagaaaaggtccctctgatagctggaccccaggttgagagggaggtggtgagaactggacgtgtggctggggacgtggggccaggcaggacctgacaccctcctcccgtcccatcctagtttggcctcctggaccacaagcacctagaccatgaggtggccaagcctgcccgaagaaagaggctgcccgagatggcccagccagttgacccggctcacaatgtcagccgcctgcaccgtgagtgtctgcccctcgatgctctccggtggccacccctaccccgccacttgccattgctggtcctctccttgtcaggtccaccttaaggagaagatgtcctggcctggagtccctgagggctcaccagtctctgggtcaaagctgatgggagcacctccttcctcagccctgacctggcccagccaggccacccaacccttctcctctgcaagccagtgggctgtccctgaagccctgctgatcactgattggaacagaggtggagaaagaggtcttgagggacttgagctgcaggggtgctggagaaggtagaaatggggttcggggtgccatcctgaaggttagaaccttctaggggagggtgtcatggaggagggggtgccaggtagtagtgtttgtagatttgggccctccacaatgtcttggggtatgtgggaattagggctgggaacccccagctcccagaccagaaacactcttgtatcttacaaatccaatgctccaggtccctgacccctcttcctccttcctctcttgttctcctcctccctccccgcccccgccggccccctccccaccgcagaaagtgggcttttgctgccaccacaagttgtaggtgctttattcccaaatctccgttcatctcgaaccacagcatgtccacgtgtgtccgatgcagactcgcggttctctaagttcacggccccacacggtttctctgtggtcctcatccttccctgcatctgtggctgtccacagccaactgggtgaaagtttggatccccctctcacaccctagggtcagtggcaggcttccagcactgtagacctgagggttctctcctccccaagctcccgctccttcccacctccgtgctgcccgcccccaaccccgccaggctagcatctcagcgtggtcagggtcctgtccaccctcccaaagccaccatcccaggatgaggggcttctggagggtgacgggggaaggcacaagtcctggctgggaaatgcggtggaagggggcaggggttctgtgggttcgggactcccagactcttggctcaggcccgccaagtaggagaaagttcagagctgggaaggcgaacagctggcattcatggaagccacactggtggtttggccgcgtgcccatccttactggatgggaggaaagtaggggaaaggggagatgcctgaggggccggaaagcgtcttcctggtcactctgggcccgcccccacccccaccgtgcagactcatttcgacctttcccctacttttccggctgggctgggggcggttcctcccagtctggagcgtctgagcctccagacgtgctcaacgccatcctcccctcctccctccctctttctttcctcaaccctgcctcctctccctctaggagctgggaccccaggcagagcctctgagatgctcctgctcagcacagttcttcccgttctggacctgctgcctcattcattcattcattcattcatttgtcaagactgttttgtttgctttttgagacggagtctcgctctgttgtccaggctggagtgcagtggcgcaatctcagctcactgcaacctctgcctcccactgggttcaagtgattctcctgcctcagcctctcaagtagatgggattataggcgcctaccgccaccacgcccagctaatttttattcatttatcaagtcttttttttttttgagacagagtctcactctgtcacccaggttggagtgcaatggttcaacctcagctgactgcaacctctgcctcccgggttcaagtgattctcctgcctctgcctcctaaggagctgggattactggcgtccaccatcacacccagctaatctttgtatgttttactagagatggggtttggccatgttgaccaggctggtctcaaactcctgaccgatccgcccgcctcccaaagtgctggattacaggcatgaaccactgcgcccggcccattcctcaagtctttattgagcagctgctatgcgctggggcctgcgtggatgctggtgccaggctgtgggcagagctgctccttgtccccagcctcatggagcctccattgagtcagaggagagaccattagatgacctcagtgtccaggagtgggaagtccttgctcaattcccatttggggtgttctggcctggtctgggggtgaggcaaggcagggtgtccttccagaagctgggacccagagagagaagtgaggaaagagagtcccgccgggcgcagtggttcacacctgtaatcccagcactttgggaggccaaggctggcggatcacgaggtcaggagatcgagaccagtctggccaacatggtgaaacccccgtctctacaaataatgcaaaaactagtcgggcgtggtggcacatgcctgtagtcccagctgctccggaggctgcggcagaattgcttgaacctgggaggcggaggttgcagtgagccaagattgcgccactgcactccagcctggcgacagagcgagactccgtatcaaaaaacaaaacaaaaaaagagagtcccaggcagggggaacagcatgtgcaaagtccctgtggcaggacggtgtgtggtacaagggtgggaagaaagcctgtgtgccagagagggtgtgggtacagcatggcaggaggaggatgggcacgggggctggtcctccaggtgccttgtggaccatgctgaggaaggacatagggagccatggaagaggttaggcagatggcagagaggtggtcatgagataagatttgccttttacttccctggtcatccactgttaagcccccagatatgcctggctcctgagaccccccccaggggctgccctcctgtttcaagtctccactttatctcccttcagggctgcccagggattgccaggagctgttccaggttggggagaggcagagtggactatttgaaatccagcctcaggggtctccgccatttttggtgaactgcaagatgacctcaggtagggtgtgttagtccaccaggggcccctctccccataggccctgttgtctttctttaaattgaaaacaaaacaaaacaaaaaaattaaaggcagggtcttgctatgttgcccaagctggtctttttttttttttttttttttgagatggagttttgctcttggagctggagtgcaatgccacgatctcagctcactgaaacctccgcctcccgggttcaagcaattctccagcgtcagcctccccagtagctgagactacaggtgcgagcaaccacacccagctaatttttgtatttttagtagagactgggtttcaccatgttggtctggctggtctcaaactcctgacctcaaatgatttgccgactttggcctcccaaaatgctgggattataggcattagccactgctcctggcctcttttctttaaaatgcagcccttgtctgggtgtagtggctcatatctgtaatcccgacactttgggaggcctatcatgaggatcacttgagcccagaagttcgagaccagcctggacaacatagtgagagctcatctttacaaaaaattttgtaaaagtaaaaaaaaaggccaagtgcagtggctcacacctgtaatcccagcactttgggaggttgaggcagacagatcacgaggtcaggagttcgagaccagcctgaccaacatggtgaaaccccgtctctactaaaaatacaaaaattagccgggcatggtggtgtgcacctgtaatcccagctactcaggtggctgaggcaggagaatctcttgaacctgggaggcagaggttgcagtgagctgagatgacgccaccgcactccagcctgggcgacagagcgagactccgtccccccatcaaaaaaataaaaaagagaaaataaaataaaataaaataaaattcagcccttgctgggcatggtggcacatgcctgtagtcccagctactcgggaggccaaggcaggagggtcacttcagcccaggagttaaaggctgccgtgagccgtgatcacacctgtgaatagccaccgcactccaacctgggcaacacaacaaaacctcgtttctaaaaaaaaacaaaggctgagcacggtggcttacacctgaaatgccagcactttgggaggctgaggcgggcaaatcacttgaggtcagaagttcaagaccagcctggccaacatggtgaaaccctatctctaccaacataaacattagccgggcgtgcctgtgattccagctgcttgtggggctgaagcacaagaatcgcttgagccccgaaggcagaggttgcagtgagctgagattgcggcactgcgatccagcctgggcaacagagtgagactccatctctaaaaaaaaaaaaaaaaaaaaagaaagcttttttttccactgagaagtcctttccattacaagaggttacaacacggggttttacccagttcagctggcccagagaggctttgcagatttccactgcctactccctcccacactcagtccctgctgggttcttgggacaaagatcttcccaaggccagcccataatattcctccctctgacccaccctcctcgagtcctccagggatgagtgagggagctgctgtcttcctgggtttggagggggtttggtgcttggcagccagatgagggagtggggtcgtctgtgaagagggacttcctggtgaccttgtacctttctgggcagatggaggctggacagtaattcagaggcgccacgatggctcagtggacttcaaccggccctgggaagcctacaaggcggggtttggggatccccacggtaggtgtttctagtggggacagaggcaggggaggaagagggaccctcagaagtggccctgcctcatggagtggcctctcccactccaggcgagttctggctgggtctggagaaggtgcatagcatcacgggggaccgcaacagccgcctggccgtgcagctgcgggactgggatggcaacgccgagttgctgcagttctccgtgcacctgggtggcgaggacacggcctatagcctgcagctcactgcacccgtggccggccagctgggcgccaccaccgtcccacccagcggcctctccgtacccttctccacttgggaccaggatcacgacctccgcagggacaagaactgcgccaagagcctctctggtgagcaggccctgccatgccacacccagccagcagcttccctccttatctttctgctgctctgtcctgccttcaaccccacattgcatctgtttcctgcccccacctcttccttacatgccgtgtgtgtgattgggccactaacttagcctatctggcctcagttttcccatcctgaaaagggtcttgaccgtctttacttttatttacttatgtgtttgtttatttatttatttatgtatttattttttgagacggagtctcactttgtcacccaggctggagtgctttgtggcacgatcttggctcactgcaagctccacctcctgagttcacaccattctcctgcctcagcctcccgagtagctgggactataggtgcccaccaccacgcctggctaatttttttgtatttttagtagagatggggtttcaccgtgttagccaggatggtctcgatctcctgacctcgtgatctgcctgcctcagcctcccaaagtgctgggattacaggcgtgagccaccgcgcccggcctacttatttattttttgagacagagtcccgctgtgtctcccaggctggagtgcaagtgacgtgatcttggctcactgcagcctccgcctcctgggttcaagtgattctcctgcctcagcctcctgagtagctgggattacaggttcccgccaccatgcacagataattgttttgtatttttagtagagacggggtttcaccatgttggccagggtggtcttgaactcctgacctcaagtgatctgcccacctcggcctcccaaagtgttgggattacaggcgtgagccacaatacccggccacaaacatctttataatggtgctccacaggattctttttttttttttttttttgaaacagggtctcactctgttgcctaagctggagtgcagtggtgcgatctcggctcactgcaacctccacctcccgggttcaagcaattctcaaaaaaaaaaaaaaattaggcacggtggctcacacttgcaatcccagcactttgggaggctgaagcgagtggatcacttgagcccaggagaccaatctgagcaacagggcgaaatcctgtctcaattaaaaatacaaaaaactagctgggcatggtggtgcctgcctgtgttcccatctacttgggaggctgagttgggaggatctcttgagcctaggagataaggctgcagtgagctgagactgcgccactgcactcaagcctgggtgacagagtgagacccctgcctcaaaagaaaaagaaaaaatgcaggcatggtggctcacacctgtggtcccagctacttgggaggcccaggtacaagaatcacttgagcccgtaaggttgacgctgcattgagccatcaccacaccactgcactccagcctgggcaatggagccaggccctgtctcaaaaaaaattgtttttaaacttaaaaataaggccgggtgtgggggctcacacctgtaatcccagcactttgggaggccgaggtgggtggatcacctgaggtcaggagttcaaaactagcctggccaacatggtgaaaccctgtctctactaaaaatacaaaaattaggccaggcgcagtgggtcatacctgtaatcccagcactttgggaggctgaggagggtggatcacatgaggtaaggagtttgagaccaacctggccaacatggtgaaaccccctcactactaaaaatacaaaaactagccaggcgtggtggcgggtgcctgtaatcccggctactcaggaggctgaggcatgagaatcccttgaacctgggaggcagaggtgcagtgagccgagattgtgccactgcactccagcctgggagatagagtgagactcagtctcaaaaaaaaagaccaaaaattagccaggtgtggtggcaggcgcctgtaatcccagctactcgggaggctgagggaggagaatcacttaaacctgagagacggaggttgcagtgagctgagatcgcaccactgcactccagcctgggtgacagagtaagactcaatctcaaaaaaaaaaaagtcaagtccaaagcccagcctggtccccaacctgcctcatcctcaaccctatccctatctcctttcagccccatcggtggctcaaagacctgaccatgttccctctcccctgaccccggcaggaggctggtggtttggcacctgcagccattccaacctcaacggccagtacttccgctccatcccacagcagcggcagaagcttaagaagggaatcttctggaagacctggcggggccgctactacccgctgcaggccaccaccatgttgatccagcccatggcagcagaggcagcctcctagcgtcctggctgggcctggtcccaggcccacgaaagacggtgactcttggctctgcccgaggatgtggccgttccctgcctgggcaggggctccaaggaggggccatctggaaacttgtggacagagaagaagaccacgactggagaagccccctttctgagtgcaggggggctgcatgcgttgcctcctgagatcgaggctgcaggatatgctcagactctagaggcgtggaccaaggggcatggagcttcactccttgctggccagggagttggggactcagagggaccacttggggccagccagactggcctcaatggcggactcagtcacattgactgacggggaccagggcttgtgtgggtcgagagcgccctcatggtgctggtgctgttgtgtgtaggtcccctggggacacaagcaggcgccaatggtatctgggcggagctcacagagttcttggaataaaagcaacctcagaacactt

SEQ ID NO: 13937 - RNA, 21 nt, Artificial Sequence
  Description of Artificial Sequence: Synthetic oligonucleotide
  modified_base (1)..(1): 2' fluoro-modified
  misc_feature (1)..(2): Phosphorothioate linkage
  modified_base (2)..(2): 2' O-methyl modified
  misc_feature (2)..(3): Phosphorothioate linkage
  modified_base (3)..(3): 2' fluoro-modified
  modified_base (4)..(4): 2' O-methyl modified
  modified_base (5)..(5): 2' fluoro-modified
  modified_base (6)..(6): 2' O-methyl modified
  modified_base (7)..(7): 2' fluoro-modified
  modified_base (8)..(8): 2' fluoro-modified
  modified_base (9)..(9): 2' fluoro-modified
  modified_base (10)..(10): 2' O-methyl modified
  modified_base (11)..(11): 2' fluoro-modified
  modified_base (12)..(12): 2' O-methyl modified
  modified_base (13)..(13): 2' fluoro-modified
  modified_base (14)..(14): 2' O-methyl modified
  modified_base (15)..(15): 2' fluoro-modified
  modified_base (16)..(16): 2' O-methyl modified
  modified_base (17)..(17): 2' fluoro-modified
  modified_base (18)..(18): 2' O-methyl modified
  modified_base (19)..(19): 2' fluoro-modified
  misc_feature (19)..(20): Phosphorothioate linkage
  modified_base (20)..(20): 2' O-methyl modified
  misc_feature (20)..(21): Phosphorothioate linkage
  modified_base (21)..(21): 2' O-methyl modified
agagcaacaggaaacaaauuu

SEQ ID NO: 13938 - RNA, 21 nt, Artificial Sequence
  Description of Artificial Sequence: Synthetic oligonucleotide
  modified_base (1)..(1): 2' fluoro-modified
  misc_feature (1)..(2): Phosphorothioate linkage
  modified_base (2)..(2): 2' O-methyl modified
  misc_feature (2)..(3): Phosphorothioate linkage
  modified_base (3)..(3): 2' fluoro-modified
  modified_base (4)..(4): 2' O-methyl modified
  modified_base (5)..(5): 2' fluoro-modified
  modified_base (6)..(6): 2' O-methyl modified
  modified_base (7)..(7): 2' fluoro-modified
  modified_base (8)..(8): 2' fluoro-modified
  modified_base (9)..(9): 2' fluoro-modified
  modified_base (10)..(10): 2' O-methyl modified
  modified_base (11)..(11): 2' fluoro-modified
  modified_base (12)..(12): 2' O-methyl modified
  modified_base (13)..(13): 2' fluoro-modified
  modified_base (14)..(14): 2' O-methyl modified
  modified_base (15)..(15): 2' fluoro-modified
  modified_base (16)..(16): 2' O-methyl modified
  modified_base (17)..(17): 2' fluoro-modified
  modified_base (18)..(18): 2' O-methyl modified
  modified_base (19)..(19): 2' fluoro-modified
  misc_feature (19)..(20): Phosphorothioate linkage
  modified_base (20)..(20): 2' O-methyl modified
  misc_feature (20)..(21): Phosphorothioate linkage
  modified_base (21)..(21): 2' O-methyl modified
auagaguggaaguauuguauu

SEQ ID NO: 13939 - RNA, 21 nt, Artificial Sequence
  Description of Artificial Sequence: Synthetic oligonucleotide
  modified_base (1)..(1): 2' fluoro-modified
  misc_feature (1)..(2): Phosphorothioate linkage
  modified_base (2)..(2): 2' O-methyl modified
  misc_feature (2)..(3): Phosphorothioate linkage
  modified_base (3)..(3): 2' fluoro-modified
  modified_base (4)..(4): 2' O-methyl modified
  modified_base (5)..(5): 2' fluoro-modified
  modified_base (6)..(6): 2' O-methyl modified
  modified_base (7)..(7): 2' fluoro-modified
  modified_base (8)..(8): 2' fluoro-modified
  modified_base (9)..(9): 2' fluoro-modified
  modified_base (10)..(10): 2' O-methyl modified
  modified_base (11)..(11): 2' fluoro-modified
  modified_base (12)..(12): 2' O-methyl modified
  modified_base (13)..(13): 2' fluoro-modified
  modified_base (14)..(14): 2' O-methyl modified
  modified_base (15)..(15): 2' fluoro-modified
  modified_base (16)..(16): 2' O-methyl modified
  modified_base (17)..(17): 2' fluoro-modified
  modified_base (18)..(18): 2' O-methyl modified
  modified_base (19)..(19): 2' fluoro-modified
  misc_feature (19)..(20): Phosphorothioate linkage
  modified_base (20)..(20): 2' O-methyl modified
  misc_feature (20)..(21): Phosphorothioate linkage
  modified_base (21)..(21): 2' O-methyl modified
auugagauuggaauggcuauu

SEQ ID NO: 13940 - RNA, 21 nt, Artificial Sequence
  Description of Artificial Sequence: Synthetic oligonucleotide
  modified_base (1)..(1): 2' fluoro-modified
  misc_feature (1)..(2): Phosphorothioate linkage
  modified_base (2)..(2): 2' O-methyl modified
  misc_feature (2)..(3): Phosphorothioate linkage
  modified_base (3)..(3): 2' fluoro-modified
  modified_base (4)..(4): 2' O-methyl modified
  modified_base (5)..(5): 2' fluoro-modified
  modified_base (6)..(6): 2' O-methyl modified
  modified_base (7)..(7): 2' fluoro-modified
  modified_base (8)..(8): 2' fluoro-modified
  modified_base (9)..(9): 2' fluoro-modified
  modified_base (10)..(10): 2' O-methyl modified
  modified_base (11)..(11): 2' fluoro-modified
  modified_base (12)..(12): 2' O-methyl modified
  modified_base (13)..(13): 2' fluoro-modified
  modified_base (14)..(14): 2' O-methyl modified
  modified_base (15)..(15): 2' fluoro-modified
  modified_base (16)..(16): 2' O-methyl modified
  modified_base (17)..(17): 2' fluoro-modified
  modified_base (18)..(18): 2' O-methyl modified
  modified_base (19)..(19): 2' fluoro-modified
  misc_feature (19)..(20): Phosphorothioate linkage
  modified_base (20)..(20): 2' O-methyl modified
  misc_feature (20)..(21): Phosphorothioate linkage
  modified_base (21)..(21): 2' O-methyl modified
ucagauggaggcuggacaauu

SEQ ID NO: 13941 - RNA, 21 nt, Artificial Sequence
  Description of Artificial Sequence: Synthetic oligonucleotide
  modified_base (1)..(1): 2' O-methyl modified
  misc_feature (1)..(2): Phosphorothioate linkage
  modified_base (2)..(2): 2' O-methyl modified
  misc_feature (2)..(3): Phosphorothioate linkage
  modified_base (3)..(3): 2' O-methyl modified
  modified_base (4)..(4): 2' O-methyl modified
  modified_base (5)..(5): 2' fluoro-modified
  modified_base (6)..(6): 2' O-methyl modified
  modified_base (7)..(7): 2' fluoro-modified
  modified_base (8)..(8): 2' fluoro-modified
  modified_base (9)..(9): 2' fluoro-modified
  modified_base (10)..(10): 2' O-methyl modified
  modified_base (11)..(11): 2' O-methyl modified
  modified_base (12)..(12): 2' O-methyl modified
  modified_base (13)..(13): 2' O-methyl modified
  modified_base (14)..(14): 2' O-methyl modified
  modified_base (15)..(15): 2' O-methyl modified
  modified_base (16)..(16): 2' O-methyl modified
  modified_base (17)..(17): 2' O-methyl modified
  modified_base (18)..(18): 2' O-methyl modified
  modified_base (19)..(19): 2' O-methyl modified
  misc_feature (19)..(20): Phosphorothioate linkage
  modified_base (20)..(20): 2' O-methyl modified
  misc_feature (20)..(21): Phosphorothioate linkage
  modified_base (21)..(21): 2' O-methyl modified
agagcaacaggaaacaaauuu

SEQ ID NO: 13942 - RNA, 21 nt, Artificial Sequence
  Description of Artificial Sequence: Synthetic oligonucleotide
  modified_base (1)..(1): 2' O-methyl modified
  misc_feature (1)..(2): Phosphorothioate linkage
  modified_base (2)..(2): 2' O-methyl modified
  misc_feature (2)..(3): Phosphorothioate linkage
  modified_base (3)..(3): 2' O-methyl modified
  modified_base (4)..(4): 2' O-methyl modified
  modified_base (5)..(5): 2' fluoro-modified
  modified_base (6)..(6): 2' O-methyl modified
  modified_base (7)..(7): 2' fluoro-modified
  modified_base (8)..(8): 2' fluoro-modified
  modified_base (9)..(9): 2' fluoro-modified
  modified_base (10)..(10): 2' O-methyl modified
  modified_base (11)..(11): 2' O-methyl modified
  modified_base (12)..(12): 2' O-methyl modified
  modified_base (13)..(13): 2' O-methyl modified
  modified_base (14)..(14): 2' O-methyl modified
  modified_base (15)..(15): 2' O-methyl modified
  modified_base (16)..(16): 2' O-methyl modified
  modified_base (17)..(17): 2' O-methyl modified
  modified_base (18)..(18): 2' O-methyl modified
  modified_base (19)..(19): 2' O-methyl modified
  misc_feature (19)..(20): Phosphorothioate linkage
  modified_base (20)..(20): 2' O-methyl modified
  misc_feature (20)..(21): Phosphorothioate linkage
  modified_base (21)..(21): 2' O-methyl modified
auagaguggaaguauuguauu

SEQ ID NO: 13943 - RNA, 21 nt, Artificial Sequence
  Description of Artificial Sequence: Synthetic oligonucleotide
  modified_base (1)..(1): 2' O-methyl modified
  misc_feature (1)..(2): Phosphorothioate linkage
  modified_base (2)..(2): 2' O-methyl modified
  misc_feature (2)..(3): Phosphorothioate linkage
  modified_base (3)..(3): 2' O-methyl modified
  modified_base (4)..(4): 2' O-methyl modified
  modified_base (5)..(5): 2' fluoro-modified
  modified_base (6)..(6): 2' O-methyl modified
  modified_base (7)..(7): 2' fluoro-modified
  modified_base (8)..(8): 2' fluoro-modified
  modified_base (9)..(9): 2' fluoro-modified
  modified_base (10)..(10): 2' O-methyl modified
  modified_base (11)..(11): 2' O-methyl modified
  modified_base (12)..(12): 2' O-methyl modified
  modified_base (13)..(13): 2' O-methyl modified
  modified_base (14)..(14): 2' O-methyl modified
  modified_base (15)..(15): 2' O-methyl modified
  modified_base (16)..(16): 2' O-methyl modified
  modified_base (17)..(17): 2' O-methyl modified
  modified_base (18)..(18): 2' O-methyl modified
  modified_base (19)..(19): 2' O-methyl modified
  misc_feature (19)..(20): Phosphorothioate linkage
  modified_base (20)..(20): 2' O-methyl modified
  misc_feature (20)..(21): Phosphorothioate linkage
  modified_base (21)..(21): 2' O-methyl modified
auugagauuggaauggcuauu

SEQ ID NO: 13944 - RNA, 21 nt, Artificial Sequence
  Description of Artificial Sequence: Synthetic oligonucleotide
  modified_base (1)..(1): 2' O-methyl modified
  misc_feature (1)..(2): Phosphorothioate linkage
  modified_base (2)..(2): 2' O-methyl modified
  misc_feature (2)..(3): Phosphorothioate linkage
  modified_base (3)..(3): 2' O-methyl modified
  modified_base (4)..(4): 2' O-methyl modified
  modified_base (5)..(5): 2' fluoro-modified
  modified_base (6)..(6): 2' O-methyl modified
  modified_base (7)..(7): 2' fluoro-modified
  modified_base (8)..(8): 2' fluoro-modified
  modified_base (9)..(9): 2' fluoro-modified
  modified_base (10)..(10): 2' O-methyl modified
  modified_base (11)..(11): 2' O-methyl modified
  modified_base (12)..(12): 2' O-methyl modified
  modified_base (13)..(13): 2' O-methyl modified
  modified_base (14)..(14): 2' O-methyl modified
  modified_base (15)..(15): 2' O-methyl modified
  modified_base (16)..(16): 2' O-methyl modified
  modified_base (17)..(17): 2' O-methyl modified
  modified_base (18)..(18): 2' O-methyl modified
  modified_base (19)..(19): 2' O-methyl modified
  misc_feature (19)..(20): Phosphorothioate linkage
  modified_base (20)..(20): 2' O-methyl modified
  misc_feature (20)..(21): Phosphorothioate linkage
  modified_base (21)..(21): 2' O-methyl modified
ucagauggaggcuggacaauu

SEQ ID NO: 13945 - RNA, 21 nt, Artificial Sequence
  Description of Artificial Sequence: Synthetic oligonucleotide
  modified_base (1)..(1): 2' O-methyl modified
  misc_feature (1)..(2): Phosphorothioate linkage
  modified_base (2)..(2): 2' fluoro-modified
  misc_feature (2)..(3): Phosphorothioate linkage
  modified_base (3)..(3): 2' O-methyl modified
  modified_base (4)..(4): 2' fluoro-modified
  modified_base (5)..(5): 2' O-methyl modified
  modified_base (6)..(6): 2' fluoro-modified
  modified_base (7)..(7): 2' O-methyl modified
  modified_base (8)..(8): 2' fluoro-modified
  modified_base (9)..(9): 2' O-methyl modified
  modified_base (10)..(10): 2' fluoro-modified
  modified_base (11)..(11): 2' O-methyl modified
  modified_base (12)..(12): 2' O-methyl modified
  modified_base (13)..(13): 2' O-methyl modified
  modified_base (14)..(14): 2' fluoro-modified
  modified_base (15)..(15): 2' O-methyl modified
  modified_base (16)..(16): 2' fluoro-modified
  modified_base (17)..(17): 2' O-methyl modified
  modified_base (18)..(18): 2' fluoro-modified
  modified_base (19)..(19): 2' O-methyl modified
  misc_feature (19)..(20): Phosphorothioate linkage
  modified_base (20)..(20): 2' O-methyl modified
  misc_feature (20)..(21): Phosphorothioate linkage
  modified_base (21)..(21): 2' O-methyl modified
auuuguuuccuguugcucuuu

SEQ ID NO: 13946 - RNA, 21 nt, Artificial Sequence
  Description of Artificial Sequence: Synthetic oligonucleotide
  modified_base (1)..(1): 2' O-methyl modified
  misc_feature (1)..(2): Phosphorothioate linkage
  modified_base (2)..(2): 2' fluoro-modified
  misc_feature (2)..(3): Phosphorothioate linkage
  modified_base (3)..(3): 2' O-methyl modified
  modified_base (4)..(4): 2' fluoro-modified
  modified_base (5)..(5): 2' O-methyl modified
  modified_base (6)..(6): 2' fluoro-modified
  modified_base (7)..(7): 2' O-methyl modified
  modified_base (8)..(8): 2' fluoro-modified
  modified_base (9)..(9): 2' O-methyl modified
  modified_base (10)..(10): 2' fluoro-modified
  modified_base (11)..(11): 2' O-methyl modified
  modified_base (12)..(12): 2' O-methyl modified
  modified_base (13)..(13): 2' O-methyl modified
  modified_base (14)..(14): 2' fluoro-modified
  modified_base (15)..(15): 2' O-methyl modified
  modified_base (16)..(16): 2' fluoro-modified
  modified_base (17)..(17): 2' O-methyl modified
  modified_base (18)..(18): 2' fluoro-modified
  modified_base (19)..(19): 2' O-methyl modified
  misc_feature (19)..(20): Phosphorothioate linkage
  modified_base (20)..(20): 2' O-methyl modified
  misc_feature (20)..(21): Phosphorothioate linkage
  modified_base (21)..(21): 2' O-methyl modified
uacaauacuuccacucuauuu

SEQ ID NO: 13947 - RNA, 21 nt, Artificial Sequence
  Description of Artificial Sequence: Synthetic oligonucleotide
  modified_base (1)..(1): 2' O-methyl modified
  misc_feature (1)..(2): Phosphorothioate linkage
  modified_base (2)..(2): 2' fluoro-modified
  misc_feature (2)..(3): Phosphorothioate linkage
  modified_base (3)..(3): 2' O-methyl modified
  modified_base (4)..(4): 2' fluoro-modified
  modified_base (5)..(5): 2' O-methyl modified
  modified_base (6)..(6): 2' fluoro-modified
  modified_base (7)..(7): 2' O-methyl modified
  modified_base (8)..(8): 2' fluoro-modified
  modified_base (9)..(9): 2' O-methyl modified
  modified_base (10)..(10): 2' fluoro-modified
  modified_base (11)..(11): 2' O-methyl modified
  modified_base (12)..(12): 2' O-methyl modified
  modified_base (13)..(13): 2' O-methyl modified
  modified_base (14)..(14): 2' fluoro-modified
  modified_base (15)..(15): 2' O-methyl modified
  modified_base (16)..(16): 2' fluoro-modified
  modified_base (17)..(17): 2' O-methyl modified
  modified_base (18)..(18): 2' fluoro-modified
  modified_base (19)..(19): 2' O-methyl modified
  misc_feature (19)..(20): Phosphorothioate linkage
  modified_base (20)..(20): 2' O-methyl modified
  misc_feature (20)..(21): Phosphorothioate linkage
  modified_base (21)..(21): 2' O-methyl modified
uagccauuccaaucucaauuu

SEQ ID NO: 13948 - RNA, 21 nt, Artificial Sequence
  Description of Artificial Sequence: Synthetic oligonucleotide
  modified_base (1)..(1): 2' O-methyl modified
  misc_feature (1)..(2): Phosphorothioate linkage
  modified_base (2)..(2): 2' fluoro-modified
  misc_feature (2)..(3): Phosphorothioate linkage
  modified_base (3)..(3): 2' O-methyl modified
  modified_base (4)..(4): 2' fluoro-modified
  modified_base (5)..(5): 2' O-methyl modified
  modified_base (6)..(6): 2' fluoro-modified
  modified_base (7)..(7): 2' O-methyl modified
  modified_base (8)..(8): 2' fluoro-modified
  modified_base (9)..(9): 2' O-methyl modified
  modified_base (10)..(10): 2' fluoro-modified
  modified_base (11)..(11): 2' O-methyl modified
  modified_base (12)..(12): 2' O-methyl modified
  modified_base (13)..(13): 2' O-methyl modified
  modified_base (14)..(14): 2' fluoro-modified
  modified_base (15)..(15): 2' O-methyl modified
  modified_base (16)..(16): 2' fluoro-modified
  modified_base (17)..(17): 2' O-methyl modified
  modified_base (18)..(18): 2' fluoro-modified
  modified_base (19)..(19): 2' O-methyl modified
  misc_feature (19)..(20): Phosphorothioate linkage
  modified_base (20)..(20): 2' O-methyl modified
  misc_feature (20)..(21): Phosphorothioate linkage
  modified_base (21)..(21): 2' O-methyl modified
uuguccagccuccaucugauu

SEQ ID NO: 13949 - RNA, 21 nt, Artificial Sequence
  Description of Artificial Sequence: Synthetic oligonucleotide
  modified_base (1)..(1): 2' O-methyl modified
  misc_feature (1)..(2): Phosphorothioate linkage
  modified_base (2)..(2): 2' fluoro-modified
  misc_feature (2)..(3): Phosphorothioate linkage
  modified_base (3)..(3): 2' O-methyl modified
  modified_base (4)..(4): 2' O-methyl modified
  modified_base (5)..(5): 2' O-methyl modified
  modified_base (6)..(6): 2' fluoro-modified
  modified_base (7)..(7): 2' O-methyl modified
  modified_base (8)..(8): 2' O-methyl modified
  modified_base (9)..(9): 2' O-methyl modified
  modified_base (10)..(10): 2' O-methyl modified
  modified_base (11)..(11): 2' O-methyl modified
  modified_base (12)..(12): 2' O-methyl modified
  modified_base (13)..(13): 2' O-methyl modified
  modified_base (14)..(14): 2' fluoro-modified
  modified_base (15)..(15): 2' O-methyl modified
  modified_base (16)..(16): 2' fluoro-modified
  modified_base (17)..(17): 2' O-methyl modified
  modified_base (18)..(18): 2' O-methyl modified
  modified_base (19)..(19): 2' O-methyl modified
  misc_feature (19)..(20): Phosphorothioate linkage
  modified_base (20)..(20): 2' O-methyl modified
  misc_feature (20)..(21): Phosphorothioate linkage
  modified_base (21)..(21): 2' O-methyl modified
auuuguuuccuguugcucuuu

SEQ ID NO: 13950 - RNA, 21 nt, Artificial Sequence
  Description of Artificial Sequence: Synthetic oligonucleotide
  modified_base (1)..(1): 2' O-methyl modified
  misc_feature (1)..(2): Phosphorothioate linkage
  modified_base (2)..(2): 2' fluoro-modified
  misc_feature (2)..(3): Phosphorothioate linkage
  modified_base (3)..(3): 2' O-methyl modified
  modified_base (4)..(4): 2' O-methyl modified
  modified_base (5)..(5): 2' O-methyl modified
  modified_base (6)..(6): 2' fluoro-modified
  modified_base (7)..(7): 2' O-methyl modified
  modified_base (8)..(8): 2' O-methyl modified
  modified_base (9)..(9): 2' O-methyl modified
  modified_base (10)..(10): 2' O-methyl modified
  modified_base (11)..(11): 2' O-methyl modified
  modified_base (12)..(12): 2' O-methyl modified
  modified_base (13)..(13): 2' O-methyl modified
  modified_base (14)..(14): 2' fluoro-modified
  modified_base (15)..(15): 2' O-methyl modified
  modified_base (16)..(16): 2' fluoro-modified
  modified_base (17)..(17): 2' O-methyl modified
  modified_base (18)..(18): 2' O-methyl modified
  modified_base (19)..(19): 2' O-methyl modified
  misc_feature (19)..(20): Phosphorothioate linkage
  modified_base (20)..(20): 2' O-methyl modified
  misc_feature (20)..(21): Phosphorothioate linkage
  modified_base (21)..(21): 2' O-methyl modified
uacaauacuuccacucuauuu

SEQ ID NO: 13951 - RNA, 21 nt, Artificial Sequence
  Description of Artificial Sequence: Synthetic oligonucleotide
  modified_base (1)..(1): 2' O-methyl modified
  misc_feature (1)..(2): Phosphorothioate linkage
  modified_base (2)..(2): 2' fluoro-modified
  misc_feature (2)..(3): Phosphorothioate linkage
  modified_base (3)..(3): 2' O-methyl modified
  modified_base (4)..(4): 2' O-methyl modified
  modified_base (5)..(5): 2' O-methyl modified
  modified_base (6)..(6): 2' fluoro-modified
  modified_base (7)..(7): 2' O-methyl modified
  modified_base (8)..(8): 2' O-methyl modified
  modified_base (9)..(9): 2' O-methyl modified
  modified_base (10)..(10): 2' O-methyl modified
  modified_base (11)..(11): 2' O-methyl modified
  modified_base (12)..(12): 2' O-methyl modified
  modified_base (13)..(13): 2' O-methyl modified
  modified_base (14)..(14): 2' fluoro-modified
  modified_base (15)..(15): 2' O-methyl modified
  modified_base (16)..(16): 2' fluoro-modified
  modified_base (17)..(17): 2' O-methyl modified
  modified_base (18)..(18): 2' O-methyl modified
  modified_base (19)..(19): 2' O-methyl modified
  misc_feature (19)..(20): Phosphorothioate linkage
  modified_base (20)..(20): 2' O-methyl modified
  misc_feature (20)..(21): Phosphorothioate linkage
  modified_base (21)..(21): 2' O-methyl modified
uagccauuccaaucucaauuu

SEQ ID NO: 13952 - RNA, 21 nt, Artificial Sequence
  Description of Artificial Sequence: Synthetic oligonucleotide
  modified_base (1)..(1): 2' O-methyl modified
  misc_feature (1)..(2): Phosphorothioate linkage
  modified_base (2)..(2): 2' fluoro-modified
  misc_feature (2)..(3): Phosphorothioate linkage
  modified_base (3)..(3): 2' O-methyl modified
  modified_base (4)..(4): 2' O-methyl modified
  modified_base (5)..(5): 2' O-methyl modified
  modified_base (6)..(6): 2' fluoro-modified
  modified_base (7)..(7): 2' O-methyl modified
  modified_base (8)..(8): 2' O-methyl modified
  modified_base (9)..(9): 2' O-methyl modified
  modified_base (10)..(10): 2' O-methyl modified
  modified_base (11)..(11): 2' O-methyl modified
  modified_base (12)..(12): 2' O-methyl modified
  modified_base (13)..(13): 2' O-methyl modified
  modified_base (14)..(14): 2' fluoro-modified
  modified_base (15)..(15): 2' O-methyl modified
  modified_base (16)..(16): 2' fluoro-modified
  modified_base (17)..(17): 2' O-methyl modified
  modified_base (18)..(18): 2' O-methyl modified
  modified_base (19)..(19): 2' O-methyl modified
  misc_feature (19)..(20): Phosphorothioate linkage
  modified_base (20)..(20): 2' O-methyl modified
  misc_feature (20)..(21): Phosphorothioate linkage
  modified_base (21)..(21): 2' O-methyl modified
uuguccagccuccaucugauu

SEQ ID NO: 13953 - DNA, 20 bp, Artificial Sequence
  Description of Artificial Sequence: Synthetic oligonucleotide
  modified_base (1)..(1): 2'O-methyl or 2'O-methoxyethyl-modified nucleoside
  misc_feature (1)..(2): Phosphorothioate linkage
  modified_base (2)..(2): 2'O-methyl or 2'O-methoxyethyl-modified nucleoside
  misc_feature (2)..(3): Phosphorothioate linkage
  modified_base (3)..(3): 2'O-methyl or 2'O-methoxyethyl-modified nucleoside
  misc_feature (3)..(4): Phosphorothioate linkage
  modified_base (4)..(4): 2'O-methyl or 2'O-methoxyethyl-modified nucleoside
  misc_feature (4)..(5): Phosphorothioate linkage
  modified_base (5)..(5): 2'O-methyl or 2'O-methoxyethyl-modified nucleoside
  misc_feature (5)..(6): Phosphorothioate linkage
  misc_feature (6)..(7): Phosphorothioate linkage
  misc_feature (7)..(8): Phosphorothioate linkage
  misc_feature (8)..(9): Phosphorothioate linkage
  misc_feature (9)..(10): Phosphorothioate linkage
  misc_feature (10)..(11): Phosphorothioate linkage
  misc_feature (11)..(12): Phosphorothioate linkage
  misc_feature (12)..(13): Phosphorothioate linkage
  misc_feature (13)..(14): Phosphorothioate linkage
  misc_feature (14)..(15): Phosphorothioate linkage
  misc_feature (15)..(16): Phosphorothioate linkage
  modified_base (16)..(16): 2'O-methyl or 2'O-methoxyethyl-modified nucleoside
  misc_feature (16)..(17): Phosphorothioate linkage
  modified_base (17)..(17): 2'O-methyl or 2'O-methoxyethyl-modified nucleoside
  misc_feature (17)..(18): Phosphorothioate linkage
  modified_base (18)..(18): 2'O-methyl or 2'O-methoxyethyl-modified nucleoside
  misc_feature (18)..(19): Phosphorothioate linkage
  modified_base (19)..(19): 2'O-methyl or 2'O-methoxyethyl-modified nucleoside
  misc_feature (19)..(20): Phosphorothioate linkage
  modified_base (20)..(20): 2'O-methyl or 2'O-methoxyethyl-modified nucleoside
tctaaccgagctgatggact

SEQ ID NO: 13954 - RNA, 21 nt, Artificial Sequence
  Description of Artificial Sequence: Synthetic oligonucleotide
  modified_base (1)..(1): 2' fluoro-modified a, c, u, g, or other
  misc_feature (1)..(2): Phosphorothioate linkage
  modified_base (2)..(2): 2' O-methyl modified a, c, u, g, or other
  misc_feature (2)..(3): Phosphorothioate linkage
  modified_base (3)..(3): 2' fluoro-modified a, c, u, g, or other
  modified_base (4)..(4): 2' O-methyl modified a, c, u, g, or other
  modified_base (5)..(5): 2' fluoro-modified a, c, u, g, or other
  modified_base (6)..(6): 2' O-methyl modified a, c, u, g, or other
  modified_base (7)..(7): 2' fluoro-modified a, c, u, g, or other
  modified_base (8)..(8): 2' fluoro-modified a, c, u, g, or other
  modified_base (9)..(9): 2' fluoro-modified a, c, u, g, or other
  modified_base (10)..(10): 2' O-methyl modified a, c, u, g, or other
  modified_base (11)..(11): 2' fluoro-modified a, c, u, g, or other
  modified_base (12)..(12): 2' O-methyl modified a, c, u, g, or other
  modified_base (13)..(13): 2' fluoro-modified a, c, u, g, or other
  modified_base (14)..(14): 2' O-methyl modified a, c, u, g, or other
  modified_base (15)..(15): 2' fluoro-modified a, c, u, g, or other
  modified_base (16)..(16): 2' O-methyl modified a, c, u, g, or other
  modified_base (17)..(17): 2' fluoro-modified a, c, u, g, or other
  modified_base (18)..(18): 2' O-methyl modified a, c, u, g, or other
  modified_base (19)..(19): 2' fluoro-modified a, c, u, g, or other
  misc_feature (19)..(20): Phosphorothioate linkage
  modified_base (20)..(20): 2' O-methyl modified a, c, u, g, or other
  misc_feature (20)..(21): Phosphorothioate linkage
  modified_base (21)..(21): 2' O-methyl modified a, c, u, g, or other
nnnnnnnnnnnnnnnnnnnnn

SEQ ID NO: 13955 - RNA, 21 nt, Artificial Sequence
  Description of Artificial Sequence: Synthetic oligonucleotide
  modified_base (1)..(1): 2' O-methyl modified a, c, u, g, or other
  misc_feature (1)..(2): Phosphorothioate linkage
  modified_base (2)..(2): 2' O-methyl modified a, c, u, g, or other
  misc_feature (2)..(3): Phosphorothioate linkage
  modified_base (3)..(3): 2' O-methyl modified a, c, u, g, or other
  modified_base (4)..(4): 2' O-methyl modified a, c, u, g, or other
  modified_base (5)..(5): 2' fluoro-modified a, c, u, g, or other
  modified_base (6)..(6): 2' O-methyl modified a, c, u, g, or other
  modified_base (7)..(7): 2' fluoro-modified a, c, u, g, or other
  modified_base (8)..(8): 2' fluoro-modified a, c, u, g, or other
  modified_base (9)..(9): 2' fluoro-modified a, c, u, g, or other
  modified_base (10)..(10): 2' O-methyl modified a, c, u, g, or other
  modified_base (11)..(11): 2' O-methyl modified a, c, u, g, or other
  modified_base (12)..(12): 2' O-methyl modified a, c, u, g, or other
  modified_base (13)..(13): 2' O-methyl modified a, c, u, g, or other
  modified_base (14)..(14): 2' O-methyl modified a, c, u, g, or other
  modified_base (15)..(15): 2' O-methyl modified a, c, u, g, or other
  modified_base (16)..(16): 2' O-methyl modified a, c, u, g, or other
  modified_base (17)..(17): 2' O-methyl modified a, c, u, g, or other
  modified_base (18)..(18): 2' O-methyl modified a, c, u, g, or other
  modified_base (19)..(19): 2' O-methyl modified a, c, u, g, or other
  misc_feature (19)..(20): Phosphorothioate linkage
  modified_base (20)..(20): 2' O-methyl modified a, c, u, g, or other
  misc_feature (20)..(21): Phosphorothioate linkage
  modified_base (21)..(21): 2' O-methyl modified a, c, u, g, or other
nnnnnnnnnnnnnnnnnnnnn

SEQ ID NO: 13956 - RNA, 21 nt, Artificial Sequence
  Description of Artificial Sequence: Synthetic oligonucleotide
  modified_base (1)..(1): 2' O-methyl modified a, c, u, g, or other
  misc_feature (1)..(2): Phosphorothioate linkage
  modified_base (2)..(2): 2' O-methyl modified a, c, u, g, or other
  misc_feature (2)..(3): Phosphorothioate linkage
  modified_base (3)..(3): 2' O-methyl modified a, c, u, g, or other
  modified_base (4)..(4): 2' O-methyl modified a, c, u, g, or other
  modified_base (5)..(5): 2' fluoro-modified a, c, u, g, or other
  modified_base (6)..(6): 2' O-methyl modified a, c, u, g, or other
  modified_base (7)..(7): 2' fluoro-modified a, c, u, g, or other
  modified_base (8)..(8): 2' O-methyl modified a, c, u, g, or other
  modified_base (9)..(9): 2' fluoro-modified a, c, u, g, or other
  modified_base (10)..(10): 2' O-methyl modified a, c, u, g, or other
  modified_base (11)..(11): 2' O-methyl modified a, c, u, g, or other
  modified_base (12)..(12): 2' O-methyl modified a, c, u, g, or other
  modified_base (13)..(13): 2' O-methyl modified a, c, u, g, or other
  modified_base (14)..(14): 2' O-methyl modified a, c, u, g, or other
  modified_base (15)..(15): 2' O-methyl modified a, c, u, g, or other
  modified_base (16)..(16): 2' O-methyl modified a, c, u, g, or other
  modified_base (17)..(17): 2' O-methyl modified a, c, u, g, or other
  modified_base (18)..(18): 2' O-methyl modified a, c, u, g, or other
  modified_base (19)..(19): 2' O-methyl modified a, c, u, g, or other
  misc_feature (19)..(20): Phosphorothioate linkage
  modified_base (20)..(20): 2' O-methyl modified a, c, u, g, or other
  misc_feature (20)..(21): Phosphorothioate linkage
  modified_base (21)..(21): 2' O-methyl modified a, c, u, g, or other
nnnnnnnnnnnnnnnnnnnnn

SEQ ID NO: 13957 - RNA, 22 nt, Artificial Sequence
  Description of Artificial Sequence: Synthetic oligonucleotide
  modified_base (1)..(1): 2' fluoro-modified a, c, u, g, or other
  misc_feature (1)..(2): Phosphorothioate linkage
  modified_base (2)..(2): 2' O-methyl modified a, c, u, g, or other
  misc_feature (2)..(3): Phosphorothioate linkage
  modified_base (3)..(3): 2' fluoro-modified a, c, u, g, or other
  modified_base (4)..(4): 2' O-methyl modified a, c, u, g, or other
  modified_base (5)..(5): 2' fluoro-modified a, c, u, g, or other
  modified_base (6)..(6): 2' O-methyl modified a, c, u, g, or other
  modified_base (7)..(7): 2' fluoro-modified a, c, u, g, or other
  modified_base (8)..(8): 2' fluoro-modified a, c, u, g, or other
  modified_base (9)..(9): 2' fluoro-modified a, c, u, g, or other
  modified_base (10)..(10): 2' O-methyl modified a, c, u, g, or other
  modified_base (11)..(11): 2' fluoro-modified a, c, u, g, or other
  modified_base (12)..(12): 2' O-methyl modified a, c, u, g, or other
  modified_base (13)..(13): 2' fluoro-modified a, c, u, g, or other
  modified_base (14)..(14): 2' O-methyl modified a, c, u, g, or other
  modified_base (15)..(15): 2' fluoro-modified a, c, u, g, or other
  modified_base (16)..(16): 2' O-methyl modified a, c, u, g, or other
  modified_base (17)..(17): 2' fluoro-modified a, c, u, g, or other
  modified_base (18)..(18): 2' O-methyl modified a, c, u, g, or other
  modified_base (19)..(19): 2' fluoro-modified a, c, u, g, or other
  misc_feature (19)..(20): Phosphorothioate linkage
  modified_base (20)..(20): 2' O-methyl modified a, c, u, g, or other
  misc_feature (20)..(21): Phosphorothioate linkage
  modified_base (21)..(21): 2' O-methyl modified a, c, u, g, or other
  modified_base (22)..(22): Any nucleoside
nnnnnnnnnnnnnnnnnnnnnn

SEQ ID NO: 13958 - RNA, 22 nt, Artificial Sequence
  Description of Artificial Sequence: Synthetic oligonucleotide
  modified_base (1)..(1): 2' O-methyl modified a, c, u, g, or other
  misc_feature (1)..(2): Phosphorothioate linkage
  modified_base (2)..(2): 2' O-methyl modified a, c, u, g, or other
  misc_feature (2)..(3): Phosphorothioate linkage
  modified_base (3)..(3): 2' O-methyl modified a, c, u, g, or other
  modified_base (4)..(4): 2' O-methyl modified a, c, u, g, or other
  modified_base (5)..(5): 2' fluoro-modified a, c, u, g, or other
  modified_base (6)..(6): 2' O-methyl modified a, c, u, g, or other
  modified_base (7)..(7): 2' fluoro-modified a, c, u, g, or other
  modified_base (8)..(8): 2' fluoro-modified a, c, u, g, or other
  modified_base (9)..(9): 2' fluoro-modified a, c, u, g, or other
  modified_base (10)..(10): 2' O-methyl modified a, c, u, g, or other
  modified_base (11)..(11): 2' O-methyl modified a, c, u, g, or other
  modified_base (12)..(12): 2' O-methyl modified a, c, u, g, or other
  modified_base (13)..(13): 2' O-methyl modified a, c, u, g, or other
  modified_base (14)..(14): 2' O-methyl modified a, c, u, g, or other
  modified_base (15)..(15): 2' O-methyl modified a, c, u, g, or other
  modified_base (16)..(16): 2' O-methyl modified a, c, u, g, or other
  modified_base (17)..(17): 2' O-methyl modified a, c, u, g, or other
  modified_base (18)..(18): 2' O-methyl modified a, c, u, g, or other
  modified_base (19)..(19): 2' O-methyl modified a, c, u, g, or other
  misc_feature (19)..(20): Phosphorothioate linkage
  modified_base (20)..(20): 2' O-methyl modified a, c, u, g, or other
  misc_feature (20)..(21): Phosphorothioate linkage
  modified_base (21)..(21): 2' O-methyl modified a, c, u, g, or other
  modified_base (22)..(22): Any nucleoside
nnnnnnnnnnnnnnnnnnnnnn

SEQ ID NO: 13959 - RNA, 21 nt, Artificial Sequence
  Description of Artificial Sequence: Synthetic oligonucleotide
  modified_base (1)..(1): 2' fluoro-modified a, c, u, g, or other
  misc_feature (1)..(2): Phosphorothioate linkage
  modified_base (2)..(2): 2' O-methyl modified a, c, u, g, or other
  misc_feature (2)..(3): Phosphorothioate linkage
  modified_base (3)..(3): 2' fluoro-modified a, c, u, g, or other
  modified_base (4)..(4): 2' O-methyl modified a, c, u, g, or other
  modified_base (5)..(5): 2' fluoro-modified a, c, u, g, or other
  modified_base (6)..(6): 2' O-methyl modified a, c, u, g, or other
  modified_base (7)..(7): 2' fluoro-modified a, c, u, g, or other
  modified_base (8)..(8): 2' O-methyl modified a, c, u, g, or other
  modified_base (9)..(9): 2' fluoro-modified a, c, u, g, or other
  modified_base (10)..(10): 2' O-methyl modified a, c, u, g, or other
  modified_base (11)..(11): 2' fluoro-modified a, c, u, g, or other
  modified_base (12)..(12): 2' O-methyl modified a, c, u, g, or other
  modified_base (13)..(13): 2' fluoro-modified a, c, u, g, or other
  modified_base (14)..(14): 2' O-methyl modified a, c, u, g, or other
  modified_base (15)..(15): 2' fluoro-modified a, c, u, g, or other
  modified_base (16)..(16): 2' O-methyl modified a, c, u, g, or other
  modified_base (17)..(17): 2' fluoro-modified a, c, u, g, or other
  modified_base (18)..(18): 2' O-methyl modified a, c, u, g, or other
  modified_base (19)..(19): 2' fluoro-modified a, c, u, g, or other
  misc_feature (19)..(20): Phosphorothioate linkage
  modified_base (20)..(20): 2' O-methyl modified a, c, u, g, or other
  misc_feature (20)..(21): Phosphorothioate linkage
  modified_base (21)..(21): 2' O-methyl modified a, c, u, g, or other
nnnnnnnnnnnnnnnnnnnnn

SEQ ID NO: 13960 - RNA, 21 nt, Artificial Sequence
  Description of Artificial Sequence: Synthetic oligonucleotide
  modified_base (1)..(1): 2' O-methyl modified a, c, u, g, or other
  misc_feature (1)..(2): Phosphorothioate linkage
  modified_base (2)..(2): 2' fluoro-modified a, c, u, g, or other
  misc_feature (2)..(3): Phosphorothioate linkage
  modified_base (3)..(3): 2' O-methyl modified a, c, u, g, or other
  modified_base (4)..(4): 2' fluoro-modified a, c, u, g, or other
  modified_base (5)..(5): 2' O-methyl modified a, c, u, g, or other
  modified_base (6)..(6): 2' fluoro-modified a, c, u, g, or other
  modified_base (7)..(7): 2' O-methyl modified a, c, u, g, or other
  modified_base (8)..(8): 2' fluoro-modified a, c, u, g, or other
  modified_base (9)..(9): 2' O-methyl modified a, c, u, g, or other
  modified_base (10)..(10): 2' fluoro-modified a, c, u, g, or other
  modified_base (11)..(11): 2' O-methyl modified a, c, u, g, or other
  modified_base (12)..(12): 2' O-methyl modified a, c, u, g, or other
  modified_base (13)..(13): 2' O-methyl modified a, c, u, g, or other
  modified_base (14)..(14): 2' fluoro-modified a, c, u, g, or other
  modified_base (15)..(15): 2' O-methyl modified a, c, u, g, or other
  modified_base (16)..(16): 2' fluoro-modified a, c, u, g, or other
  modified_base (17)..(17): 2' O-methyl modified a, c, u, g, or other
  modified_base (18)..(18): 2' fluoro-modified a, c, u, g, or other
  modified_base (19)..(19): 2' O-methyl modified a, c, u, g, or other
  misc_feature (19)..(20): Phosphorothioate linkage
  modified_base (20)..(20): 2' O-methyl modified a, c, u, g, or other
  misc_feature (20)..(21): Phosphorothioate linkage
  modified_base (21)..(21): 2' O-methyl modified a, c, u, g, or other
nnnnnnnnnnnnnnnnnnnnn

SEQ ID NO: 13961 - RNA, 21 nt, Artificial Sequence
  Description of Artificial Sequence: Synthetic oligonucleotide
  modified_base (1)..(1): 2' O-methyl modified a, c, u, g, or other
  misc_feature (1)..(2): Phosphorothioate linkage
  modified_base (2)..(2): 2' fluoro-modified a, c, u, g, or other
  misc_feature (2)..(3): Phosphorothioate linkage
  modified_base (3)..(3): 2' O-methyl modified a, c, u, g, or other
  modified_base (4)..(4): 2' O-methyl modified a, c, u, g, or other
  modified_base (5)..(5): 2' O-methyl modified a, c, u, g, or other
  modified_base (6)..(6): 2' fluoro-modified a, c, u, g, or other
  modified_base (7)..(7): 2' O-methyl modified a, c, u, g, or other
  modified_base (8)..(8): 2' fluoro-modified a, c, u, g, or other
  modified_base (9)..(9): 2' fluoro-modified a, c, u, g, or other
  modified_base (10)..(10): 2' O-methyl modified a, c, u, g, or other
  modified_base (11)..(11): 2' O-methyl modified a, c, u, g, or other
  modified_base (12)..(12): 2' O-methyl modified a, c, u, g, or other
  modified_base (13)..(13): 2' O-methyl modified a, c, u, g, or other
  modified_base (14)..(14): 2' fluoro-modified a, c, u, g, or other
  modified_base (15)..(15): 2' O-methyl modified a, c, u, g, or other
  modified_base (16)..(16): 2' fluoro-modified a, c, u, g, or other
  modified_base (17)..(17): 2' O-methyl modified a, c, u, g, or other
  modified_base (18)..(18): 2' O-methyl modified a, c, u, g, or other
  modified_base (19)..(19): 2' O-methyl modified a, c, u, g, or other
  misc_feature (19)..(20): Phosphorothioate linkage
  modified_base (20)..(20): 2' O-methyl modified a, c, u, g, or other
  misc_feature (20)..(21): Phosphorothioate linkage
  modified_base (21)..(21): 2' O-methyl modified a, c, u, g, or other
nnnnnnnnnnnnnnnnnnnnn

SEQ ID NO: 13962 - RNA, 21 nt, Artificial Sequence
  Description of Artificial Sequence: Synthetic oligonucleotide
  modified_base (1)..(1): 2' O-methyl modified a, c, u, g, or other
  misc_feature (1)..(2): Phosphorothioate linkage
  modified_base (2)..(2): 2' fluoro-modified a, c, u, g, or other
  misc_feature (2)..(3): Phosphorothioate linkage
  modified_base (3)..(3): 2' O-methyl modified a, c, u, g, or other
  modified_base (4)..(4): 2' O-methyl modified a, c, u, g, or other
  modified_base (5)..(5): 2' O-methyl modified a, c, u, g, or other
  modified_base (6)..(6): 2' fluoro-modified a, c, u, g, or other
  modified_base (7)..(7): 2' O-methyl modified a, c, u, g, or other
  modified_base (8)..(8): 2' O-methyl modified a, c, u, g, or other
  modified_base (9)..(9): 2' O-methyl modified a, c, u, g, or other
  modified_base (10)..(10): 2' O-methyl modified a, c, u, g, or other
  modified_base (11)..(11): 2' O-methyl modified a, c, u, g, or other
  modified_base (12)..(12): 2' O-methyl modified a, c, u, g, or other
  modified_base (13)..(13): 2' O-methyl modified a, c, u, g, or other
  modified_base (14)..(14): 2' fluoro-modified a, c, u, g, or other
  modified_base (15)..(15): 2' O-methyl modified a, c, u, g, or other
  modified_base (16)..(16): 2' fluoro-modified a, c, u, g, or other
  modified_base (17)..(17): 2' O-methyl modified a, c, u, g, or other
  modified_base (18)..(18): 2' O-methyl modified a, c, u, g, or other
  modified_base (19)..(19): 2' O-methyl modified a, c, u, g, or other
  misc_feature (19)..(20): Phosphorothioate linkage
  modified_base (20)..(20): 2' O-methyl modified a, c, u, g, or other
  misc_feature (20)..(21): Phosphorothioate linkage
  modified_base (21)..(21): 2' O-methyl modified a, c, u, g, or other
nnnnnnnnnnnnnnnnnnnnn

SEQ ID NO: 13963 - RNA, 21 nt, Artificial Sequence
  Description of Artificial Sequence: Synthetic oligonucleotide
  modified_base (1)..(1): 2' O-methyl modified a, c, u, g, or other
  misc_feature (1)..(2): Phosphorothioate linkage
  modified_base (2)..(2): 2' fluoro-modified a, c, u, g, or other
  misc_feature (2)..(3): Phosphorothioate linkage
  modified_base (3)..(3): 2' O-methyl modified a, c, u, g, or other
  modified_base (4)..(4): 2' fluoro-modified a, c, u, g, or other
  modified_base (5)..(5): 2' O-methyl modified a, c, u, g, or other
  modified_base (6)..(6): 2' fluoro-modified a, c, u, g, or other
  modified_base (7)..(7): 2' O-methyl modified a, c, u, g, or other
  modified_base (8)..(8): 2' O-methyl modified a, c, u, g, or other
  modified_base (9)..(9): 2' O-methyl modified a, c, u, g, or other
  modified_base (10)..(10): 2' O-methyl modified a, c, u, g, or other
  modified_base (11)..(11): 2' O-methyl modified a, c, u, g, or other
  modified_base (12)..(12): 2' O-methyl modified a, c, u, g, or other
  modified_base (13)..(13): 2' O-methyl modified a, c, u, g, or other
  modified_base (14)..(14): 2' fluoro-modified a, c, u, g, or other
  modified_base (15)..(15): 2' O-methyl modified a, c, u, g, or other
  modified_base (16)..(16): 2' fluoro-modified a, c, u, g, or other
  modified_base (17)..(17): 2' O-methyl modified a, c, u, g, or other
  modified_base (18)..(18): 2' O-methyl modified a, c, u, g, or other
  modified_base (19)..(19): 2' O-methyl modified a, c, u, g, or other
  misc_feature (19)..(20): Phosphorothioate linkage
  modified_base (20)..(20): 2' O-methyl modified a, c, u, g, or other
  misc_feature (20)..(21): Phosphorothioate linkage
  modified_base (21)..(21): 2' O-methyl modified a, c, u, g, or other
nnnnnnnnnnnnnnnnnnnnn

SEQ ID NO: 13964 - RNA, 21 nt, Artificial Sequence
  Description of Artificial Sequence: Synthetic oligonucleotide
  modified_base (1)..(1): 2' O-methyl modified a, c, u, g, or other
  misc_feature (1)..(2): Phosphorothioate linkage
  modified_base (2)..(2): 2' fluoro-modified a, c, u, g, or other
  misc_feature (2)..(3): Phosphorothioate linkage
  modified_base (3)..(3): 2' O-methyl modified a, c, u, g, or other
  modified_base (4)..(4): 2' O-methyl modified a, c, u, g, or other
  modified_base (5)..(5): 2' O-methyl modified a, c, u, g, or other
  modified_base (6)..(6): 2' fluoro-modified a, c, u, g, or other
  modified_base (7)..(7): 2' O-methyl modified a, c, u, g, or other
  modified_base (8)..(8): 2' fluoro-modified a, c, u, g, or other
  modified_base (9)..(9): 2' O-methyl modified a, c, u, g, or other
  modified_base (10)..(10): 2' O-methyl modified a, c, u, g, or other
  modified_base (11)..(11): 2' O-methyl modified a, c, u, g, or other
  modified_base (12)..(12): 2' O-methyl modified a, c, u, g, or other
  modified_base (13)..(13): 2' O-methyl modified a, c, u, g, or other
  modified_base (14)..(14): 2' fluoro-modified a, c, u, g, or other
  modified_base (15)..(15): 2' O-methyl modified a, c, u, g, or other
  modified_base (16)..(16): 2' fluoro-modified a, c, u, g, or other
  modified_base (17)..(17): 2' O-methyl modified a, c, u, g, or other
  modified_base (18)..(18): 2' O-methyl modified a, c, u, g, or other
  modified_base (19)..(19): 2' O-methyl modified a, c, u, g, or other
  misc_feature (19)..(20): Phosphorothioate linkage
  modified_base (20)..(20): 2' O-methyl modified a, c, u, g, or other
  misc_feature (20)..(21): Phosphorothioate linkage
  modified_base (21)..(21): 2' O-methyl modified a, c, u, g, or other
nnnnnnnnnnnnnnnnnnnnn

SEQ ID NO: 13965 - RNA, 21 nt, Artificial Sequence
  Description of Artificial Sequence: Synthetic oligonucleotide
  modified_base (1)..(1): 2' O-methyl modified a, c, u, g, or other
  misc_feature (1)..(2): Phosphorothioate linkage
  modified_base (2)..(2): 2' fluoro-modified a, c, u, g, or other
  misc_feature (2)..(3): Phosphorothioate linkage
  modified_base (3)..(3): 2' O-methyl modified a, c, u, g, or other
  modified_base (4)..(4): 2' fluoro-modified a, c, u, g, or other
  modified_base (5)..(5): 2' O-methyl modified a, c, u, g, or other
  modified_base (6)..(6): 2' fluoro-modified a, c, u, g, or other
  modified_base (7)..(7): 2' O-methyl modified a, c, u, g, or other
  modified_base (8)..(8): 2' fluoro-modified a, c, u, g, or other
  modified_base (9)..(9): 2' O-methyl modified a, c, u, g, or other
  modified_base (10)..(10): 2' fluoro-modified a, c, u, g, or other
  modified_base (11)..(11): 2' O-methyl modified a, c, u, g, or other
  modified_base (12)..(12): 2' fluoro-modified a, c, u, g, or other
  modified_base (13)..(13): 2' O-methyl modified a, c, u, g, or other
  modified_base (14)..(14): 2' fluoro-modified a, c, u, g, or other
  modified_base (15)..(15): 2' O-methyl modified a, c, u, g, or other
  modified_base (16)..(16): 2' fluoro-modified a, c, u, g, or other
  modified_base (17)..(17): 2' O-methyl modified a, c, u, g, or other
  modified_base (18)..(18): 2' fluoro-modified a, c, u, g, or other
  modified_base (19)..(19): 2' O-methyl modified a, c, u, g, or other
  misc_feature (19)..(20): Phosphorothioate linkage
  modified_base (20)..(20): 2' O-methyl modified a, c, u, g, or other
  misc_feature (20)..(21): Phosphorothioate linkage
  modified_base (21)..(21): 2' O-methyl modified a, c, u, g, or other
nnnnnnnnnnnnnnnnnnnnn

SEQ ID NO: 13966 - RNA, 21 nt, Artificial Sequence
  Description of Artificial Sequence: Synthetic oligonucleotide
  modified_base (1)..(1): 2' O-methyl modified a, c, u, g, or other
  misc_feature (1)..(2): Phosphorothioate linkage
  modified_base (2)..(2): 2' fluoro-modified a, c, u, g, or other
  misc_feature (2)..(3): Phosphorothioate linkage
  modified_base (3)..(3): 2' O-methyl modified a, c, u, g, or other
  modified_base (4)..(4): 2' fluoro-modified a, c, u, g, or other
  modified_base (5)..(5): 2' O-methyl modified a, c, u, g, or other
  modified_base (6)..(6): 2' fluoro-modified a, c, u, g, or other
  modified_base (7)..(7): 2' O-methyl modified a, c, u, g, or other
  modified_base (8)..(8): 2' fluoro-modified a, c, u, g, or other
  modified_base (9)..(9): 2' fluoro-modified a, c, u, g, or other
  modified_base (10)..(10): 2' O-methyl modified a, c, u, g, or other
  modified_base (11)..(11): 2' O-methyl modified a, c, u, g, or other
  modified_base (12)..(12): 2' O-methyl modified a, c, u, g, or other
  modified_base (13)..(13): 2' O-methyl modified a, c, u, g, or other
  modified_base (14)..(14): 2' fluoro-modified a, c, u, g, or other
  modified_base (15)..(15): 2' O-methyl modified a, c, u, g, or other
  modified_base (16)..(16): 2' fluoro-modified a, c, u, g, or other
  modified_base (17)..(17): 2' O-methyl modified a, c, u, g, or other
  modified_base (18)..(18): 2' O-methyl modified a, c, u, g, or other
  modified_base (19)..(19): 2' O-methyl modified a, c, u, g, or other
  misc_feature (19)..(20): Phosphorothioate linkage
  modified_base (20)..(20): 2' O-methyl modified a, c, u, g, or other
  misc_feature (20)..(21): Phosphorothioate linkage
  modified_base (21)..(21): 2' O-methyl modified a, c, u, g, or other
nnnnnnnnnnnnnnnnnnnnn

SEQ ID NO: 13967 - RNA, 21 nt, Artificial Sequence
  Description of Artificial Sequence: Synthetic oligonucleotide
  modified_base (1)..(1): 2' O-methyl modified a, c, u, g, or other
  misc_feature (1)..(2): Phosphorothioate linkage
  modified_base (2)..(2): 2' fluoro-modified a, c, u, g, or other
  misc_feature (2)..(3): Phosphorothioate linkage
  modified_base (3)..(3): 2' O-methyl modified a, c, u, g, or other
  modified_base (4)..(4): 2' O-methyl modified a, c, u, g, or other
  modified_base (5)..(5): 2' O-methyl modified a, c, u, g, or other
  modified_base (6)..(6): 2' O-methyl modified a, c, u, g, or other
  modified_base (7)..(7): 2' O-methyl modified a, c, u, g, or other
  modified_base (8)..(8): 2' O-methyl modified a, c, u, g, or other
  modified_base (9)..(9): 2' O-methyl modified a, c, u, g, or other
  modified_base (10)..(10): 2' O-methyl modified a, c, u, g, or other
  modified_base (11)..(11): 2' O-methyl modified a, c, u, g, or other
  modified_base (12)..(12): 2' O-methyl modified a, c, u, g, or other
  modified_base (13)..(13): 2' O-methyl modified a, c, u, g, or other
  modified_base (14)..(14): 2' fluoro-modified a, c, u, g, or other
  modified_base (15)..(15): 2' O-methyl modified a, c, u, g, or other
  modified_base (16)..(16): 2' O-methyl modified a, c, u, g, or other
  modified_base (17)..(17): 2' O-methyl modified a, c, u, g, or other
  modified_base (18)..(18): 2' O-methyl modified a, c, u, g, or other
  modified_base (19)..(19): 2' O-methyl modified a, c, u, g, or other
  misc_feature (19)..(20): Phosphorothioate linkage
  modified_base (20)..(20): 2' O-methyl modified a, c, u, g, or other
  misc_feature (20)..(21): Phosphorothioate linkage
  modified_base (21)..(21): 2' O-methyl modified a, c, u, g, or other
nnnnnnnnnnnnnnnnnnnnn

SEQ ID NO: 13968 - RNA, 21 nt, Artificial Sequence
  Description of Artificial Sequence: Synthetic oligonucleotide
  modified_base (1)..(1): 2' O-methyl modified a, c, u, g, or other
  misc_feature (1)..(2): Phosphorothioate linkage
  modified_base (2)..(2): 2' fluoro-modified a, c, u, g, or other
  misc_feature (2)..(3): Phosphorothioate linkage
  modified_base (3)..(3): 2' O-methyl modified a, c, u, g, or other
  modified_base (4)..(4): 2' O-methyl modified a, c, u, g, or other
  modified_base (5)..(5): 2' O-methyl modified a, c, u, g, or other
  modified_base (6)..(6): 2' fluoro-modified a, c, u, g, or other
  modified_base (7)..(7): 2' O-methyl modified a, c, u, g, or other
  modified_base (8)..(8): 2' O-methyl modified a, c, u, g, or other
  modified_base (9)..(9): 2' O-methyl modified a, c, u, g, or other
  modified_base (10)..(10): 2' O-methyl modified a, c, u, g, or other
  modified_base (11)..(11): 2' O-methyl modified a, c, u, g, or other
  modified_base (12)..(12): 2' O-methyl modified a, c, u, g, or other
  modified_base (13)..(13): 2' O-methyl modified a, c, u, g, or other
  modified_base (14)..(14): 2' fluoro-modified a, c, u, g, or other
  modified_base (15)..(15): 2' O-methyl modified a, c, u, g, or other
  modified_base (16)..(16): 2' fluoro-modified a, c, u, g, or other
  modified_base (17)..(17): 2' O-methyl modified a, c, u, g, or other
  modified_base (18)..(18): 2' fluoro-modified a, c, u, g, or other
  modified_base (19)..(19): 2' O-methyl modified a, c, u, g, or other
  misc_feature (19)..(20): Phosphorothioate linkage
  modified_base (20)..(20): 2' O-methyl modified a, c, u, g, or other
  misc_feature (20)..(21): Phosphorothioate linkage
  modified_base (21)..(21): 2' O-methyl modified a, c, u, g, or other
nnnnnnnnnnnnnnnnnnnnn

SEQ ID NO: 13969 - DNA, 20 bp, Artificial Sequence
  Description of Artificial Sequence: Synthetic oligonucleotide
  modified_base (1)..(1): 2'O-methyl or 2'O-methoxyethyl-modified a, c, t, g, or other
  misc_feature (1)..(2): Phosphorothioate linkage
  modified_base (2)..(2): 2'O-methyl or 2'O-methoxyethyl-modified a, c, t, g, or other
  misc_feature (2)..(3): Phosphorothioate linkage
  modified_base (3)..(3): 2'O-methyl or 2'O-methoxyethyl-modified a, c, t, g, or other
  misc_feature (3)..(4): Phosphorothioate linkage
  modified_base (4)..(4): 2'O-methyl or 2'O-methoxyethyl-modified a, c, t, g, or other
  misc_feature (4)..(5): Phosphorothioate linkage
  modified_base (5)..(5): 2'O-methyl or 2'O-methoxyethyl-modified a, c, t, g, or other
  misc_feature (5)..(6): Phosphorothioate linkage
  modified_base (6)..(6): a, c, t or g
  misc_feature (6)..(7): Phosphorothioate linkage
  modified_base (7)..(7): a, c, t or g
  misc_feature (7)..(8): Phosphorothioate linkage
  modified_base (8)..(8): a, c, t or g
  misc_feature (8)..(9): Phosphorothioate linkage
  modified_base (9)..(9): a, c, t or g
  misc_feature (9)..(10): Phosphorothioate linkage
  modified_base (10)..(10): a, c, t or g
  misc_feature (10)..(11): Phosphorothioate linkage
  modified_base (11)..(11): a, c, t or g
  misc_feature (11)..(12): Phosphorothioate linkage
  modified_base (12)..(12): a, c, t or g
  misc_feature (12)..(13): Phosphorothioate linkage
  modified_base (13)..(13): a, c, t or g
  misc_feature (13)..(14): Phosphorothioate linkage
  modified_base (14)..(14): a, c, t or g
  misc_feature (14)..(15): Phosphorothioate linkage
  modified_base (15)..(15): a, c, t or g
  misc_feature (15)..(16): Phosphorothioate linkage
  modified_base (16)..(16): 2'O-methyl or 2'O-methoxyethyl-modified a, c, t, g, or other
  misc_feature (16)..(17): Phosphorothioate linkage
  modified_base (17)..(17): 2'O-methyl or 2'O-methoxyethyl-modified a, c, t, g, or other
  misc_feature (17)..(18): Phosphorothioate linkage
  modified_base (18)..(18): 2'O-methyl or 2'O-methoxyethyl-modified a, c, t, g, or other
  misc_feature (18)..(19): Phosphorothioate linkage
  modified_base (19)..(19): 2'O-methyl or 2'O-methoxyethyl-modified a, c, t, g, or other
  misc_feature (19)..(20): Phosphorothioate linkage
  modified_base (20)..(20): 2'O-methyl or 2'O-methoxyethyl-modified a, c, t, g, or other
nnnnnnnnnnnnnnnnnnnn

SEQ ID NO: 13970 - RNA, 19 nt, Artificial Sequence
  Description of Artificial Sequence: Synthetic oligonucleotide
cagaguggacuauuugaaa

SEQ ID NO: 13971 - RNA, 19 nt, Artificial Sequence
  Description of Artificial Sequence: Synthetic oligonucleotide
agcuuaagaagggaaucua

SEQ ID NO: 13972 - RNA, 19 nt, Artificial Sequence
  Description of Artificial Sequence: Synthetic oligonucleotide
gaucgaggcugcaggauaa

SEQ ID NO: 13973 - RNA, 19 nt, Artificial Sequence
  Description of Artificial Sequence: Synthetic oligonucleotide
cagaguucuuggaauaaaa

SEQ ID NO: 13974 - RNA, 21 nt, Artificial Sequence
  Description of Artificial Sequence: Synthetic oligonucleotide
cagaguggacuauuugaaauu

SEQ ID NO: 13975 - RNA, 21 nt, Artificial Sequence
  Description of Artificial Sequence: Synthetic oligonucleotide
agcuuaagaagggaaucuauu

SEQ ID NO: 13976 - RNA, 21 nt, Artificial Sequence
  Description of Artificial Sequence: Synthetic oligonucleotide
gaucgaggcugcaggauaauu

SEQ ID NO: 13977 - RNA, 21 nt, Artificial Sequence
  Description of Artificial Sequence: Synthetic oligonucleotide
cagaguucuuggaauaaaauu

SEQ ID NO: 13978 - RNA, 19 nt, Artificial Sequence
  Description of Artificial Sequence: Synthetic oligonucleotide
uuucaaauaguccacucug

SEQ ID NO: 13979 - RNA, 19 nt, Artificial Sequence
  Description of Artificial Sequence: Synthetic oligonucleotide
uagauucccuucuuaagcu

SEQ ID NO: 13980 - RNA, 19 nt, Artificial Sequence
  Description of Artificial Sequence: Synthetic oligonucleotide
uuauccugcagccucgauc

SEQ ID NO: 13981 - RNA, 19 nt, Artificial Sequence
  Description of Artificial Sequence: Synthetic oligonucleotide
uuuuauuccaagaacucug

SEQ ID NO: 13982 - RNA, 21 nt, Artificial Sequence
  Description of Artificial Sequence: Synthetic oligonucleotide
uuucaaauaguccacucuguu

SEQ ID NO: 13983 - RNA, 21 nt, Artificial Sequence
  Description of Artificial Sequence: Synthetic oligonucleotide
uagauucccuucuuaagcuuu

SEQ ID NO: 13984 - RNA, 21 nt, Artificial Sequence
  Description of Artificial Sequence: Synthetic oligonucleotide
uuauccugcagccucgaucuu

SEQ ID NO: 13985 - RNA, 21 nt, Artificial Sequence
  Description of Artificial Sequence: Synthetic oligonucleotide
uuuuauuccaagaacucuguu

SEQ ID NO: 13986 - RNA, 21 nt, Artificial Sequence
  Description of Artificial Sequence: Synthetic oligonucleotide
  modified_base (1)..(1): 2' O-methyl modified
  misc_feature (1)..(2): Phosphorothioate linkage
  modified_base (2)..(2): 2' O-methyl modified
  misc_feature (2)..(3): Phosphorothioate linkage
  modified_base (3)..(3): 2' O-methyl modified
  modified_base (4)..(4): 2' O-methyl modified
  modified_base (5)..(5): 2' fluoro-modified
  modified_base (6)..(6): 2' O-methyl modified
  modified_base (7)..(7): 2' fluoro-modified
  modified_base (8)..(8): 2' O-methyl modified
  modified_base (9)..(9): 2' fluoro-modified
  modified_base (10)..(10): 2' O-methyl modified
  modified_base (11)..(11): 2' O-methyl modified
  modified_base (12)..(12): 2' O-methyl modified
  modified_base (13)..(13): 2' O-methyl modified
  modified_base (14)..(14): 2' O-methyl modified
  modified_base (15)..(15): 2' O-methyl modified
  modified_base (16)..(16): 2' O-methyl modified
  modified_base (17)..(17): 2' O-methyl modified
  modified_base (18)..(18): 2' O-methyl modified
  modified_base (19)..(19): 2' O-methyl modified
  misc_feature (19)..(20): Phosphorothioate linkage
  modified_base (20)..(20): 2' O-methyl modified
  misc_feature (20)..(21): Phosphorothioate linkage
  modified_base (21)..(21): 2' O-methyl modified
cagaguggacuauuugaaauu

SEQ ID NO: 13987 - RNA, 21 nt, Artificial Sequence
  Description of Artificial Sequence: Synthetic oligonucleotide
  modified_base (1)..(1): 2' O-methyl modified
  misc_feature (1)..(2): Phosphorothioate linkage
  modified_base (2)..(2): 2' O-methyl modified
  misc_feature (2)..(3): Phosphorothioate linkage
  modified_base (3)..(3): 2' O-methyl modified
  modified_base (4)..(4): 2' O-methyl modified
  modified_base (5)..(5): 2' fluoro-modified
  modified_base (6)..(6): 2' O-methyl modified
  modified_base (7)..(7): 2' fluoro-modified
  modified_base (8)..(8): 2' O-methyl modified
  modified_base (9)..(9): 2' fluoro-modified
  modified_base (10)..(10): 2' O-methyl modified
  modified_base (11)..(11): 2' O-methyl modified
  modified_base (12)..(12): 2' O-methyl modified
  modified_base (13)..(13): 2' O-methyl modified
  modified_base (14)..(14): 2' O-methyl modified
  modified_base (15)..(15): 2' O-methyl modified
  modified_base (16)..(16): 2' O-methyl modified
  modified_base (17)..(17): 2' O-methyl modified
  modified_base (18)..(18): 2' O-methyl modified
  modified_base (19)..(19): 2' O-methyl modified
  misc_feature (19)..(20): Phosphorothioate linkage
  modified_base (20)..(20): 2' O-methyl modified
  misc_feature (20)..(21): Phosphorothioate linkage
  modified_base (21)..(21): 2' O-methyl modified
agcuuaagaagggaaucuauu

SEQ ID NO: 13988 - RNA, 21 nt, Artificial Sequence
  Description of Artificial Sequence: Synthetic oligonucleotide
  modified_base (1)..(1): 2' O-methyl modified
  misc_feature (1)..(2): Phosphorothioate linkage
  modified_base (2)..(2): 2' O-methyl modified
  misc_feature (2)..(3): Phosphorothioate linkage
  modified_base (3)..(3): 2' O-methyl modified
  modified_base (4)..(4): 2' O-methyl modified
  modified_base (5)..(5): 2' fluoro-modified
  modified_base (6)..(6): 2' O-methyl modified
  modified_base (7)..(7): 2' fluoro-modified
  modified_base (8)..(8): 2' O-methyl modified
  modified_base (9)..(9): 2' fluoro-modified
  modified_base (10)..(10): 2' O-methyl modified
  modified_base (11)..(11): 2' O-methyl modified
  modified_base (12)..(12): 2' O-methyl modified
  modified_base (13)..(13): 2' O-methyl modified
  modified_base (14)..(14): 2' O-methyl modified
  modified_base (15)..(15): 2' O-methyl modified
  modified_base (16)..(16): 2' O-methyl modified
  modified_base (17)..(17): 2' O-methyl modified
  modified_base (18)..(18): 2' O-methyl modified
  modified_base (19)..(19): 2' O-methyl modified
  misc_feature (19)..(20): Phosphorothioate linkage
  modified_base (20)..(20): 2' O-methyl modified
  misc_feature (20)..(21): Phosphorothioate linkage
  modified_base (21)..(21): 2' O-methyl modified
gaucgaggcugcaggauaauu

SEQ ID NO: 13989 - RNA, 21 nt, Artificial Sequence
  Description of Artificial Sequence: Synthetic oligonucleotide
  modified_base (1)..(1): 2' O-methyl modified
  misc_feature (1)..(2): Phosphorothioate linkage
  modified_base (2)..(2): 2' O-methyl modified
  misc_feature (2)..(3): Phosphorothioate linkage
  modified_base (3)..(3): 2' O-methyl modified
  modified_base (4)..(4): 2' O-methyl modified
  modified_base (5)..(5): 2' fluoro-modified
  modified_base (6)..(6): 2' O-methyl modified
  modified_base (7)..(7): 2' fluoro-modified
  modified_base (8)..(8): 2' O-methyl modified
  modified_base (9)..(9): 2' fluoro-modified
  modified_base (10)..(10): 2' O-methyl modified
  modified_base (11)..(11): 2' O-methyl modified
  modified_base (12)..(12): 2' O-methyl modified
  modified_base (13)..(13): 2' O-methyl modified
  modified_base (14)..(14): 2' O-methyl modified
  modified_base (15)..(15): 2' O-methyl modified
  modified_base (16)..(16): 2' O-methyl modified
  modified_base (17)..(17): 2' O-methyl modified
  modified_base (18)..(18): 2' O-methyl modified
  modified_base (19)..(19): 2' O-methyl modified
  misc_feature (19)..(20): Phosphorothioate linkage
  modified_base (20)..(20): 2' O-methyl modified
  misc_feature (20)..(21): Phosphorothioate linkage
  modified_base (21)..(21): 2' O-methyl modified
cagaguucuuggaauaaaauu

SEQ ID NO: 13990 - RNA, 21 nt, Artificial Sequence
  Description of Artificial Sequence: Synthetic oligonucleotide
  modified_base (1)..(1): 2' O-methyl modified
  misc_feature (1)..(2): Phosphorothioate linkage
  modified_base (2)..(2): 2' O-methyl modified
  misc_feature (2)..(3): Phosphorothioate linkage
  modified_base (3)..(3): 2' O-methyl modified
  modified_base (4)..(4): 2' O-methyl modified
  modified_base (5)..(5): 2' fluoro-modified
  modified_base (6)..(6): 2' O-methyl modified
  modified_base (7)..(7): 2' fluoro-modified
  modified_base (8)..(8): 2' fluoro-modified
  modified_base (9)..(9): 2' fluoro-modified
  modified_base (10)..(10): 2' O-methyl modified
  modified_base (11)..(11): 2' O-methyl modified
  modified_base (12)..(12): 2' O-methyl modified
  modified_base (13)..(13): 2' O-methyl modified
  modified_base (14)..(14): 2' O-methyl modified
  modified_base (15)..(15): 2' O-methyl modified
  modified_base (16)..(16): 2' O-methyl modified
  modified_base (17)..(17): 2' O-methyl modified
  modified_base (18)..(18): 2' O-methyl modified
  modified_base (19)..(19): 2' O-methyl modified
  misc_feature (19)..(20): Phosphorothioate linkage
  modified_base (20)..(20): 2' O-methyl modified
  misc_feature (20)..(21): Phosphorothioate linkage
  modified_base (21)..(21): 2' O-methyl modified
cagaguggacuauuugaaauu

SEQ ID NO: 13991 - RNA, 21 nt, Artificial Sequence
  Description of Artificial Sequence: Synthetic oligonucleotide
  modified_base (1)..(1): 2' O-methyl modified
  misc_feature (1)..(2): Phosphorothioate linkage
  modified_base (2)..(2): 2' O-methyl modified
  misc_feature (2)..(3): Phosphorothioate linkage
  modified_base (3)..(3): 2' O-methyl modified
  modified_base (4)..(4): 2' O-methyl modified
  modified_base (5)..(5): 2' fluoro-modified
  modified_base (6)..(6): 2' O-methyl modified
  modified_base (7)..(7): 2' fluoro-modified
  modified_base (8)..(8): 2' fluoro-modified
  modified_base (9)..(9): 2' fluoro-modified
  modified_base (10)..(10): 2' O-methyl modified
  modified_base (11)..(11): 2' O-methyl modified
  modified_base (12)..(12): 2' O-methyl modified
  modified_base (13)..(13): 2' O-methyl modified
  modified_base (14)..(14): 2' O-methyl modified
  modified_base (15)..(15): 2' O-methyl modified
  modified_base (16)..(16): 2' O-methyl modified
  modified_base (17)..(17): 2' O-methyl modified
  modified_base (18)..(18): 2' O-methyl modified
  modified_base (19)..(19): 2' O-methyl modified
  misc_feature (19)..(20): Phosphorothioate linkage
  modified_base (20)..(20): 2' O-methyl modified
  misc_feature (20)..(21): Phosphorothioate linkage
  modified_base (21)..(21): 2' O-methyl modified
agcuuaagaagggaaucuauu

SEQ ID NO: 13992 - RNA, 21 nt, Artificial Sequence
  Description of Artificial Sequence: Synthetic oligonucleotide
  modified_base (1)..(1): 2' O-methyl modified
  misc_feature (1)..(2): Phosphorothioate linkage
  modified_base (2)..(2): 2' O-methyl modified
  misc_feature (2)..(3): Phosphorothioate linkage
  modified_base (3)..(3): 2' O-methyl modified
  modified_base (4)..(4): 2' O-methyl modified
  modified_base (5)..(5): 2' fluoro-modified
  modified_base (6)..(6): 2' O-methyl modified
  modified_base (7)..(7): 2' fluoro-modified
  modified_base (8)..(8): 2' fluoro-modified
  modified_base (9)..(9): 2' fluoro-modified
  modified_base (10)..(10): 2' O-methyl modified
  modified_base (11)..(11): 2' O-methyl modified
  modified_base (12)..(12): 2' O-methyl modified
  modified_base (13)..(13): 2' O-methyl modified
  modified_base (14)..(14): 2' O-methyl modified
  modified_base (15)..(15): 2' O-methyl modified
  modified_base (16)..(16): 2' O-methyl modified
  modified_base (17)..(17): 2' O-methyl modified
  modified_base (18)..(18): 2' O-methyl modified
  modified_base (19)..(19): 2' O-methyl modified
  misc_feature (19)..(20): Phosphorothioate linkage
  modified_base (20)..(20): 2' O-methyl modified
  misc_feature (20)..(21): Phosphorothioate linkage
  modified_base (21)..(21): 2' O-methyl modified
gaucgaggcugcaggauaauu

SEQ ID NO: 13993 - RNA, 21 nt, Artificial Sequence
  Description of Artificial Sequence: Synthetic oligonucleotide
  modified_base (1)..(1): 2' O-methyl modified
  misc_feature (1)..(2): Phosphorothioate linkage
  modified_base (2)..(2): 2' O-methyl modified
  misc_feature (2)..(3): Phosphorothioate linkage
  modified_base (3)..(3): 2' O-methyl modified
  modified_base (4)..(4): 2' O-methyl modified
  modified_base (5)..(5): 2' fluoro-modified
  modified_base (6)..(6): 2' O-methyl modified
  modified_base (7)..(7): 2' fluoro-modified
  modified_base (8)..(8): 2' fluoro-modified
  modified_base (9)..(9): 2' fluoro-modified
  modified_base (10)..(10): 2' O-methyl modified
  modified_base (11)..(11): 2' O-methyl modified
  modified_base (12)..(12): 2' O-methyl modified
  modified_base (13)..(13): 2' O-methyl modified
  modified_base (14)..(14): 2' O-methyl modified
  modified_base (15)..(15): 2' O-methyl modified
  modified_base (16)..(16): 2' O-methyl modified
  modified_base (17)..(17): 2' O-methyl modified
  modified_base (18)..(18): 2' O-methyl modified
  modified_base (19)..(19): 2' O-methyl modified
  misc_feature (19)..(20): Phosphorothioate linkage
  modified_base (20)..(20): 2' O-methyl modified
  misc_feature (20)..(21): Phosphorothioate linkage
  modified_base (21)..(21): 2' O-methyl modified
cagaguucuuggaauaaaauu

SEQ ID NO: 13994 - RNA, 21 nt, Artificial Sequence
  Description of Artificial Sequence: Synthetic oligonucleotide
  modified_base (1)..(1): 2' O-methyl modified
  modified_base (2)..(2): 2' O-methyl modified
  modified_base (3)..(3): 2' O-methyl modified
  modified_base (4)..(4): 2' O-methyl modified
  modified_base (5)..(5): 2' fluoro-modified
  modified_base (6)..(6): 2' O-methyl modified
  modified_base (7)..(7): 2' fluoro-modified
  modified_base (8)..(8): 2' fluoro-modified
  modified_base (9)..(9): 2' fluoro-modified
  modified_base (10)..(10): 2' O-methyl modified
  modified_base (11)..(11): 2' O-methyl modified
  modified_base (12)..(12): 2' O-methyl modified
  modified_base (13)..(13): 2' O-methyl modified
  modified_base (14)..(14): 2' O-methyl modified
  modified_base (15)..(15): 2' O-methyl modified
  modified_base (16)..(16): 2' O-methyl modified
  modified_base (17)..(17): 2' O-methyl modified
  modified_base (18)..(18): 2' O-methyl modified
  modified_base (19)..(19): 2' O-methyl modified
  misc_feature (19)..(20): Phosphorothioate linkage
  modified_base (20)..(20): 2' O-methyl modified
  misc_feature (20)..(21): Phosphorothioate linkage
  modified_base (21)..(21): 2' O-methyl modified
cagaguggacuauuugaaauu

SEQ ID NO: 13995 - RNA, 21 nt, Artificial Sequence
  Description of Artificial Sequence: Synthetic oligonucleotide
  modified_base (1)..(1): 2' O-methyl modified
  modified_base (2)..(2): 2' O-methyl modified
  modified_base (3)..(3): 2' O-methyl modified
  modified_base (4)..(4): 2' O-methyl modified
  modified_base (5)..(5): 2' fluoro-modified
  modified_base (6)..(6): 2' O-methyl modified
  modified_base (7)..(7): 2' fluoro-modified
  modified_base (8)..(8): 2' fluoro-modified
  modified_base (9)..(9): 2' fluoro-modified
  modified_base (10)..(10): 2' O-methyl modified
  modified_base (11)..(11): 2' O-methyl modified
  modified_base (12)..(12): 2' O-methyl modified
  modified_base (13)..(13): 2' O-methyl modified
  modified_base (14)..(14): 2' O-methyl modified
  modified_base (15)..(15): 2' O-methyl modified
  modified_base (16)..(16): 2' O-methyl modified
  modified_base (17)..(17): 2' O-methyl modified
  modified_base (18)..(18): 2' O-methyl modified
  modified_base (19)..(19): 2' O-methyl modified
  misc_feature (19)..(20): Phosphorothioate linkage
  modified_base (20)..(20): 2' O-methyl modified
  misc_feature (20)..(21): Phosphorothioate linkage
  modified_base (21)..(21): 2' O-methyl modified
agcuuaagaagggaaucuauu

SEQ ID NO: 13996 - RNA, 21 nt, Artificial Sequence
  Description of Artificial Sequence: Synthetic oligonucleotide
  modified_base (1)..(1): 2' O-methyl modified
  modified_base (2)..(2): 2' O-methyl modified
  modified_base (3)..(3): 2' O-methyl modified
  modified_base (4)..(4): 2' O-methyl modified
  modified_base (5)..(5): 2' fluoro-modified
  modified_base (6)..(6): 2' O-methyl modified
  modified_base (7)..(7): 2' fluoro-modified
  modified_base (8)..(8): 2' fluoro-modified
  modified_base (9)..(9): 2' fluoro-modified
  modified_base (10)..(10): 2' O-methyl modified
  modified_base (11)..(11): 2' O-methyl modified
  modified_base (12)..(12): 2' O-methyl modified
  modified_base (13)..(13): 2' O-methyl modified
  modified_base (14)..(14): 2' O-methyl modified
  modified_base (15)..(15): 2' O-methyl modified
  modified_base (16)..(16): 2' O-methyl modified
  modified_base (17)..(17): 2' O-methyl modified
  modified_base (18)..(18): 2' O-methyl modified
  modified_base (19)..(19): 2' O-methyl modified
  misc_feature (19)..(20): Phosphorothioate linkage
  modified_base (20)..(20): 2' O-methyl modified
  misc_feature (20)..(21): Phosphorothioate linkage
  modified_base (21)..(21): 2' O-methyl modified
gaucgaggcugcaggauaauu

SEQ ID NO: 13997 - RNA, 21 nt, Artificial Sequence
  Description of Artificial Sequence: Synthetic oligonucleotide
  modified_base (1)..(1): 2' O-methyl modified
  modified_base (2)..(2): 2' O-methyl modified
  modified_base (3)..(3): 2' O-methyl modified
  modified_base (4)..(4): 2' O-methyl modified
  modified_base (5)..(5): 2' fluoro-modified
  modified_base (6)..(6): 2' O-methyl modified
  modified_base (7)..(7): 2' fluoro-modified
  modified_base (8)..(8): 2' fluoro-modified
  modified_base (9)..(9): 2' fluoro-modified
  modified_base (10)..(10): 2' O-methyl modified
  modified_base (11)..(11): 2' O-methyl modified
  modified_base (12)..(12): 2' O-methyl modified
  modified_base (13)..(13): 2' O-methyl modified
  modified_base (14)..(14): 2' O-methyl modified
  modified_base (15)..(15): 2' O-methyl modified
  modified_base (16)..(16): 2' O-methyl modified
  modified_base (17)..(17): 2' O-methyl modified
  modified_base (18)..(18): 2' O-methyl modified
  modified_base (19)..(19): 2' O-methyl modified
  misc_feature (19)..(20): Phosphorothioate linkage
  modified_base (20)..(20): 2' O-methyl modified
  misc_feature (20)..(21): Phosphorothioate linkage
  modified_base (21)..(21): 2' O-methyl modified
cagaguucuuggaauaaaauu

SEQ ID NO: 13998 - RNA, 21 nt, Artificial Sequence
  Description of Artificial Sequence: Synthetic oligonucleotide
  modified_base (1)..(1): 2' O-methyl modified
  modified_base (2)..(2): 2' O-methyl modified
  modified_base (3)..(3): 2' O-methyl modified
  modified_base (4)..(4): 2' O-methyl modified
  modified_base (5)..(5): 2' fluoro-modified
  modified_base (6)..(6): 2' O-methyl modified
  modified_base (7)..(7): 2' fluoro-modified
  modified_base (8)..(8): 2' O-methyl modified
  modified_base (9)..(9): 2' fluoro-modified
  modified_base (10)..(10): 2' O-methyl modified
  modified_base (11)..(11): 2' O-methyl modified
  modified_base (12)..(12): 2' O-methyl modified
  modified_base (13)..(13): 2' O-methyl modified
  modified_base (14)..(14): 2' O-methyl modified
  modified_base (15)..(15): 2' O-methyl modified
  modified_base (16)..(16): 2' O-methyl modified
  modified_base (17)..(17): 2' O-methyl modified
  modified_base (18)..(18): 2' O-methyl modified
  modified_base (19)..(19): 2' O-methyl modified
  misc_feature (19)..(20): Phosphorothioate linkage
  modified_base (20)..(20): 2' O-methyl modified
  misc_feature (20)..(21): Phosphorothioate linkage
  modified_base (21)..(21): 2' O-methyl modified
cagaguggacuauuugaaauu

SEQ ID NO: 13999 - RNA, 21 nt, Artificial Sequence
  Description of Artificial Sequence: Synthetic oligonucleotide
  modified_base (1)..(1): 2' O-methyl modified
  modified_base (2)..(2): 2' O-methyl modified
  modified_base (3)..(3): 2' O-methyl modified
  modified_base (4)..(4): 2' O-methyl modified
  modified_base (5)..(5): 2' fluoro-modified
  modified_base (6)..(6): 2' O-methyl modified
  modified_base (7)..(7): 2' fluoro-modified
  modified_base (8)..(8): 2' O-methyl modified
  modified_base (9)..(9): 2' fluoro-modified
  modified_base (10)..(10): 2' O-methyl modified
  modified_base (11)..(11): 2' O-methyl modified
  modified_base (12)..(12): 2' O-methyl modified
  modified_base (13)..(13): 2' O-methyl modified
  modified_base (14)..(14): 2' O-methyl modified
  modified_base (15)..(15): 2' O-methyl modified
  modified_base (16)..(16): 2' O-methyl modified
  modified_base (17)..(17): 2' O-methyl modified
  modified_base (18)..(18): 2' O-methyl modified
  modified_base (19)..(19): 2' O-methyl modified
  misc_feature (19)..(20): Phosphorothioate linkage
  modified_base (20)..(20): 2' O-methyl modified
  misc_feature (20)..(21): Phosphorothioate linkage
  modified_base (21)..(21): 2' O-methyl modified
agcuuaagaagggaaucuauu

SEQ ID NO: 14000 - RNA, 21 nt, Artificial Sequence
  Description of Artificial Sequence: Synthetic oligonucleotide
  modified_base (1)..(1): 2' O-methyl modified
  modified_base (2)..(2): 2' O-methyl modified
  modified_base (3)..(3): 2' O-methyl modified
  modified_base (4)..(4): 2' O-methyl modified
  modified_base (5)..(5): 2' fluoro-modified
  modified_base (6)..(6): 2' O-methyl modified
  modified_base (7)..(7): 2' fluoro-modified
  modified_base (8)..(8): 2' O-methyl modified
  modified_base (9)..(9): 2' fluoro-modified
  modified_base (10)..(10): 2' O-methyl modified
  modified_base (11)..(11): 2' O-methyl modified
  modified_base (12)..(12): 2' O-methyl modified
  modified_base (13)..(13): 2' O-methyl modified
  modified_base (14)..(14): 2' O-methyl modified
  modified_base (15)..(15): 2' O-methyl modified
  modified_base (16)..(16): 2' O-methyl modified
  modified_base (17)..(17): 2' O-methyl modified
  modified_base (18)..(18): 2' O-methyl modified
  modified_base (19)..(19): 2' O-methyl modified
  misc_feature (19)..(20): Phosphorothioate linkage
  modified_base (20)..(20): 2' O-methyl modified
  misc_feature (20)..(21): Phosphorothioate linkage
  modified_base (21)..(21): 2' O-methyl modified
gaucgaggcugcaggauaauu

SEQ ID NO: 14001 - RNA, 21 nt, Artificial Sequence
  Description of Artificial Sequence: Synthetic oligonucleotide
  modified_base (1)..(1): 2' O-methyl modified
  modified_base (2)..(2): 2' O-methyl modified
  modified_base (3)..(3): 2' O-methyl modified
  modified_base (4)..(4): 2' O-methyl modified
  modified_base (5)..(5): 2' fluoro-modified
  modified_base (6)..(6): 2' O-methyl modified
  modified_base (7)..(7): 2' fluoro-modified
  modified_base (8)..(8): 2' O-methyl modified
  modified_base (9)..(9): 2' fluoro-modified
  modified_base (10)..(10): 2' O-methyl modified
  modified_base (11)..(11): 2' O-methyl modified
  modified_base (12)..(12): 2' O-methyl modified
  modified_base (13)..(13): 2' O-methyl modified
  modified_base (14)..(14): 2' O-methyl modified
  modified_base (15)..(15): 2' O-methyl modified
  modified_base (16)..(16): 2' O-methyl modified
  modified_base (17)..(17): 2' O-methyl modified
  modified_base (18)..(18): 2' O-methyl modified
  modified_base (19)..(19): 2' O-methyl modified
  misc_feature (19)..(20): Phosphorothioate linkage
  modified_base (20)..(20): 2' O-methyl modified
  misc_feature (20)..(21): Phosphorothioate linkage
  modified_base (21)..(21): 2' O-methyl modified
cagaguucuuggaauaaaauu

SEQ ID NO: 14002 - RNA, 21 nt, Artificial Sequence
  Description of Artificial Sequence: Synthetic oligonucleotide
  modified_base (1)..(1): 2' fluoro-modified
  misc_feature (1)..(2): Phosphorothioate linkage
  modified_base (2)..(2): 2' O-methyl modified
  misc_feature (2)..(3): Phosphorothioate linkage
  modified_base (3)..(3): 2' fluoro-modified
  modified_base (4)..(4): 2' O-methyl modified
  modified_base (5)..(5): 2' fluoro-modified
  modified_base (6)..(6): 2' O-methyl modified
  modified_base (7)..(7): 2' fluoro-modified
  modified_base (8)..(8): 2' O-methyl modified
  modified_base (9)..(9): 2' fluoro-modified
  modified_base (10)..(10): 2' O-methyl modified
  modified_base (11)..(11): 2' fluoro-modified
  modified_base (12)..(12): 2' O-methyl modified
  modified_base (13)..(13): 2' fluoro-modified
  modified_base (14)..(14): 2' O-methyl modified
  modified_base (15)..(15): 2' fluoro-modified
  modified_base (16)..(16): 2' O-methyl modified
  modified_base (17)..(17): 2' fluoro-modified
  modified_base (18)..(18): 2' O-methyl modified
  modified_base (19)..(19): 2' fluoro-modified
  misc_feature (19)..(20): Phosphorothioate linkage
  modified_base (20)..(20): 2' O-methyl modified
  misc_feature (20)..(21): Phosphorothioate linkage
  modified_base (21)..(21): 2' O-methyl modified
cagaguggacuauuugaaauu

SEQ ID NO: 14003 - RNA, 21 nt, Artificial Sequence
  Description of Artificial Sequence: Synthetic oligonucleotide
  modified_base (1)..(1): 2' fluoro-modified
  misc_feature (1)..(2): Phosphorothioate linkage
  modified_base (2)..(2): 2' O-methyl modified
  misc_feature (2)..(3): Phosphorothioate linkage
  modified_base (3)..(3): 2' fluoro-modified
  modified_base (4)..(4): 2' O-methyl modified
  modified_base (5)..(5): 2' fluoro-modified
  modified_base (6)..(6): 2' O-methyl modified
  modified_base (7)..(7): 2' fluoro-modified
  modified_base (8)..(8): 2' O-methyl modified
  modified_base (9)..(9): 2' fluoro-modified
  modified_base (10)..(10): 2' O-methyl modified
  modified_base (11)..(11): 2' fluoro-modified
  modified_base (12)..(12): 2' O-methyl modified
  modified_base (13)..(13): 2' fluoro-modified
  modified_base (14)..(14): 2' O-methyl modified
  modified_base (15)..(15): 2' fluoro-modified
  modified_base (16)..(16): 2' O-methyl modified
  modified_base (17)..(17): 2' fluoro-modified
  modified_base (18)..(18): 2' O-methyl modified
  modified_base (19)..(19): 2' fluoro-modified
  misc_feature (19)..(20): Phosphorothioate linkage
  modified_base (20)..(20): 2' O-methyl modified
  misc_feature (20)..(21): Phosphorothioate linkage
  modified_base (21)..(21): 2' O-methyl modified
agcuuaagaagggaaucuauu

SEQ ID NO: 14004 - RNA, 21 nt, Artificial Sequence
  Description of Artificial Sequence: Synthetic oligonucleotide
  modified_base (1)..(1): 2' fluoro-modified
  misc_feature (1)..(2): Phosphorothioate linkage
  modified_base (2)..(2): 2' O-methyl modified
  misc_feature (2)..(3): Phosphorothioate linkage
  modified_base (3)..(3): 2' fluoro-modified
  modified_base (4)..(4): 2' O-methyl modified
  modified_base (5)..(5): 2' fluoro-modified
  modified_base (6)..(6): 2' O-methyl modified
  modified_base (7)..(7): 2' fluoro-modified
  modified_base (8)..(8): 2' O-methyl modified
  modified_base (9)..(9): 2' fluoro-modified
  modified_base (10)..(10): 2' O-methyl modified
  modified_base (11)..(11): 2' fluoro-modified
  modified_base (12)..(12): 2' O-methyl modified
  modified_base (13)..(13): 2' fluoro-modified
  modified_base (14)..(14): 2' O-methyl modified
  modified_base (15)..(15): 2' fluoro-modified
  modified_base (16)..(16): 2' O-methyl modified
  modified_base (17)..(17): 2' fluoro-modified
  modified_base (18)..(18): 2' O-methyl modified
  modified_base (19)..(19): 2' fluoro-modified
  misc_feature (19)..(20): Phosphorothioate linkage
  modified_base (20)..(20): 2' O-methyl modified
  misc_feature (20)..(21): Phosphorothioate linkage
  modified_base (21)..(21): 2' O-methyl modified
gaucgaggcugcaggauaauu

SEQ ID NO: 14005 - RNA, 21 nt, Artificial Sequence
  Description of Artificial Sequence: Synthetic oligonucleotide
  modified_base (1)..(1): 2' fluoro-modified
  misc_feature (1)..(2): Phosphorothioate linkage
  modified_base (2)..(2): 2' O-methyl modified
  misc_feature (2)..(3): Phosphorothioate linkage
  modified_base (3)..(3): 2' fluoro-modified
  modified_base (4)..(4): 2' O-methyl modified
  modified_base (5)..(5): 2' fluoro-modified
  modified_base (6)..(6): 2' O-methyl modified
  modified_base (7)..(7): 2' fluoro-modified
  modified_base (8)..(8): 2' O-methyl modified
  modified_base (9)..(9): 2' fluoro-modified
  modified_base (10)..(10): 2' O-methyl modified
  modified_base (11)..(11): 2' fluoro-modified
  modified_base (12)..(12): 2' O-methyl modified
  modified_base (13)..(13): 2' fluoro-modified
  modified_base (14)..(14): 2' O-methyl modified
  modified_base (15)..(15): 2' fluoro-modified
  modified_base (16)..(16): 2' O-methyl modified
  modified_base (17)..(17): 2' fluoro-modified
  modified_base (18)..(18): 2' O-methyl modified
  modified_base (19)..(19): 2' fluoro-modified
  misc_feature (19)..(20): Phosphorothioate linkage
  modified_base (20)..(20): 2' O-methyl modified
  misc_feature (20)..(21): Phosphorothioate linkage
  modified_base (21)..(21): 2' O-methyl modified
cagaguucuuggaauaaaauu

SEQ ID NO: 14006 - RNA, 21 nt, Artificial Sequence
  Description of Artificial Sequence: Synthetic oligonucleotide
  modified_base (1)..(1): 2' fluoro-modified
  misc_feature (1)..(2): Phosphorothioate linkage
  modified_base (2)..(2): 2' O-methyl modified
  misc_feature (2)..(3): Phosphorothioate linkage
  modified_base (3)..(3): 2' fluoro-modified
  modified_base (4)..(4): 2' O-methyl modified
  modified_base (5)..(5): 2' fluoro-modified
  modified_base (6)..(6): 2' O-methyl modified
  modified_base (7)..(7): 2' fluoro-modified
  modified_base (8)..(8): 2' fluoro-modified
  modified_base (9)..(9): 2' fluoro-modified
  modified_base (10)..(10): 2' O-methyl modified
  modified_base (11)..(11): 2' fluoro-modified
  modified_base (12)..(12): 2' O-methyl modified
  modified_base (13)..(13): 2' fluoro-modified
  modified_base (14)..(14): 2' O-methyl modified
  modified_base (15)..(15): 2' fluoro-modified
  modified_base (16)..(16): 2' O-methyl modified
  modified_base (17)..(17): 2' fluoro-modified
  modified_base (18)..(18): 2' O-methyl modified
  modified_base (19)..(19): 2' fluoro-modified
  misc_feature (19)..(20): Phosphorothioate linkage
  modified_base (20)..(20): 2' O-methyl modified
  misc_feature (20)..(21): Phosphorothioate linkage
  modified_base (21)..(21): 2' O-methyl modified
cagaguucuuggaauaaaauu

SEQ ID NO: 14007 - RNA, 21 nt, Artificial Sequence
  Description of Artificial Sequence: Synthetic oligonucleotide
  modified_base (1)..(1): 2' O-methyl modified
  misc_feature (1)..(2): Phosphorothioate linkage
  modified_base (2)..(2): 2' O-methyl modified
  misc_feature (2)..(3): Phosphorothioate linkage
  modified_base (3)..(3): 2' O-methyl modified
  modified_base (4)..(4): 2' O-methyl modified
  modified_base (5)..(5): 2' fluoro-modified
  modified_base (6)..(6): 2' O-methyl modified
  modified_base (7)..(7): 2' fluoro-modified
  modified_base (8)..(8): 2' fluoro-modified
  modified_base (9)..(9): 2' fluoro-modified
  modified_base (10)..(10): 2' O-methyl modified
  modified_base (11)..(11): 2' O-methyl modified
  modified_base (12)..(12): 2' O-methyl modified
  modified_base (13)..(13): 2' O-methyl modified
  modified_base (14)..(14): 2' O-methyl modified
  modified_base (15)..(15): 2' O-methyl modified
  modified_base (16)..(16): 2' O-methyl modified
  modified_base (17)..(17): 2' O-methyl modified
  modified_base (18)..(18): 2' O-methyl modified
  modified_base (19)..(19): 2' O-methyl modified
  misc_feature (19)..(20): Phosphorothioate linkage
  modified_base (20)..(20): 2' O-methyl modified
  misc_feature (20)..(21): Phosphorothioate linkage
  modified_base (21)..(21): 2' O-methyl modified
cagaguucuuggaauaaaauu

SEQ ID NO: 14008 - RNA, 21 nt, Artificial Sequence
  Description of Artificial Sequence: Synthetic oligonucleotide
  modified_base (1)..(1): 2' O-methyl modified
  misc_feature (1)..(2): Phosphorothioate linkage
  modified_base (2)..(2): 2' O-methyl modified
  misc_feature (2)..(3): Phosphorothioate linkage
  modified_base (3)..(3): 2' O-methyl modified
  modified_base (4)..(4): 2' O-methyl modified
  modified_base (5)..(5): 2' fluoro-modified
  modified_base (6)..(6): 2' O-methyl modified
  modified_base (7)..(7): 2' fluoro-modified
  modified_base (8)..(8): 2' O-methyl modified
  modified_base (9)..(9): 2' fluoro-modified
  modified_base (10)..(10): 2' O-methyl modified
  modified_base (11)..(11): 2' O-methyl modified
  modified_base (12)..(12): 2' O-methyl modified
  modified_base (13)..(13): 2' O-methyl modified
  modified_base (14)..(14): 2' O-methyl modified
  modified_base (15)..(15): 2' O-methyl modified
  modified_base (16)..(16): 2' O-methyl modified
  modified_base (17)..(17): 2' O-methyl modified
  modified_base (18)..(18): 2' O-methyl modified
  modified_base (19)..(19): 2' O-methyl modified
  misc_feature (19)..(20): Phosphorothioate linkage
  modified_base (20)..(20): 2' O-methyl modified
  misc_feature (20)..(21): Phosphorothioate linkage
  modified_base (21)..(21): 2' O-methyl modified
cagaguucuuggaauaaaauu

SEQ ID NO: 14009 - RNA, 21 nt, Artificial Sequence
  Description of Artificial Sequence: Synthetic oligonucleotide
  modified_base (1)..(1): 2' fluoro-modified
  misc_feature (1)..(2): Phosphorothioate linkage
  modified_base (2)..(2): 2' O-methyl modified
  misc_feature (2)..(3): Phosphorothioate linkage
  modified_base (3)..(3): 2' fluoro-modified
  modified_base (4)..(4): 2' O-methyl modified
  modified_base (5)..(5): 2' fluoro-modified
  modified_base (6)..(6): 2' O-methyl modified
  modified_base (7)..(7): 2' fluoro-modified
  modified_base (8)..(8): 2' fluoro-modified
  modified_base (9)..(9): 2' fluoro-modified
  modified_base (10)..(10): 2' O-methyl modified
  modified_base (11)..(11): 2' fluoro-modified
  modified_base (12)..(12): 2' O-methyl modified
  modified_base (13)..(13): 2' fluoro-modified
  modified_base (14)..(14): 2' O-methyl modified
  modified_base (15)..(15): 2' fluoro-modified
  modified_base (16)..(16): 2' O-methyl modified
  modified_base (17)..(17): 2' fluoro-modified
  modified_base (18)..(18): 2' O-methyl modified
  modified_base (19)..(19): 2' fluoro-modified
  misc_feature (19)..(20): Phosphorothioate linkage
  modified_base (20)..(20): 2' O-methyl modified
  misc_feature (20)..(21): Phosphorothioate linkage
  modified_base (21)..(21): 2' O-methyl modified
cagaguucuuggaauaaaauu

SEQ ID NO: 14010 - RNA, 21 nt, Artificial Sequence
  Description of Artificial Sequence: Synthetic oligonucleotide
  modified_base (1)..(1): 2' O-methyl modified
  misc_feature (1)..(2): Phosphorothioate linkage
  modified_base (2)..(2): 2' O-methyl modified
  misc_feature (2)..(3): Phosphorothioate linkage
  modified_base (3)..(3): 2' O-methyl modified
  modified_base (4)..(4): 2' O-methyl modified
  modified_base (5)..(5): 2' fluoro-modified
  modified_base (6)..(6): 2' O-methyl modified
  modified_base (7)..(7): 2' fluoro-modified
  modified_base (8)..(8): 2' fluoro-modified
  modified_base (9)..(9): 2' fluoro-modified
  modified_base (10)..(10): 2' O-methyl modified
  modified_base (11)..(11): 2' O-methyl modified
  modified_base (12)..(12): 2' O-methyl modified
  modified_base (13)..(13): 2' O-methyl modified
  modified_base (14)..(14): 2' O-methyl modified
  modified_base (15)..(15): 2' O-methyl modified
  modified_base (16)..(16): 2' O-methyl modified
  modified_base (17)..(17): 2' O-methyl modified
  modified_base (18)..(18): 2' O-methyl modified
  modified_base (19)..(19): 2' O-methyl modified
  misc_feature (19)..(20): Phosphorothioate linkage
  modified_base (20)..(20): 2' O-methyl modified
  misc_feature (20)..(21): Phosphorothioate linkage
  modified_base (21)..(21): 2' O-methyl modified
cagaguucuuggaauaaaauu

SEQ ID NO: 14011 - RNA, 21 nt, Artificial Sequence
  Description of Artificial Sequence: Synthetic oligonucleotide
  modified_base (1)..(1): 2' fluoro-modified
  misc_feature (1)..(2): Phosphorothioate linkage
  modified_base (2)..(2): 2' O-methyl modified
  misc_feature (2)..(3): Phosphorothioate linkage
  modified_base (3)..(3): 2' fluoro-modified
  modified_base (4)..(4): 2' O-methyl modified
  modified_base (5)..(5): 2' fluoro-modified
  modified_base (6)..(6): 2' O-methyl modified
  modified_base (7)..(7): 2' fluoro-modified
  modified_base (8)..(8): 2' O-methyl modified
  modified_base (9)..(9): 2' fluoro-modified
  modified_base (10)..(10): 2' O-methyl modified
  modified_base (11)..(11): 2' fluoro-modified
  modified_base (12)..(12): 2' O-methyl modified
  modified_base (13)..(13): 2' fluoro-modified
  modified_base (14)..(14): 2' O-methyl modified
  modified_base (15)..(15): 2' fluoro-modified
  modified_base (16)..(16): 2' O-methyl modified
  modified_base (17)..(17): 2' fluoro-modified
  modified_base (18)..(18): 2' O-methyl modified
  modified_base (19)..(19): 2' fluoro-modified
  misc_feature (19)..(20): Phosphorothioate linkage
  modified_base (20)..(20): 2' O-methyl modified
  misc_feature (20)..(21): Phosphorothioate linkage
  modified_base (21)..(21): 2' O-methyl modified
cagaguucuuggaauaaaauu

SEQ ID NO: 14012 - RNA, 21 nt, Artificial Sequence
  Description of Artificial Sequence: Synthetic oligonucleotide
  modified_base (1)..(1): 2' fluoro-modified
  misc_feature (1)..(2): Phosphorothioate linkage
  modified_base (2)..(2): 2' O-methyl modified
  misc_feature (2)..(3): Phosphorothioate linkage
  modified_base (3)..(3): 2' fluoro-modified
  modified_base (4)..(4): 2' O-methyl modified
  modified_base (5)..(5): 2' fluoro-modified
  modified_base (6)..(6): 2' O-methyl modified
  modified_base (7)..(7): 2' fluoro-modified
  modified_base (8)..(8): 2' fluoro-modified
  modified_base (9)..(9): 2' fluoro-modified
  modified_base (10)..(10): 2' O-methyl modified
  modified_base (11)..(11): 2' fluoro-modified
  modified_base (12)..(12): 2' O-methyl modified
  modified_base (13)..(13): 2' fluoro-modified
  modified_base (14)..(14): 2' O-methyl modified
  modified_base (15)..(15): 2' fluoro-modified
  modified_base (16)..(16): 2' O-methyl modified
  modified_base (17)..(17): 2' fluoro-modified
  modified_base (18)..(18): 2' O-methyl modified
  modified_base (19)..(19): 2' fluoro-modified
  misc_feature (19)..(20): Phosphorothioate linkage
  modified_base (20)..(20): 2' O-methyl modified
  misc_feature (20)..(21): Phosphorothioate linkage
  modified_base (21)..(21): 2' O-methyl modified
gugauccgauucuuuccaauu

SEQ ID NO: 14013 - RNA, 21 nt, Artificial Sequence
  Description of Artificial Sequence: Synthetic oligonucleotide
  modified_base (1)..(1): 2' fluoro-modified
  misc_feature (1)..(2): Phosphorothioate linkage
  modified_base (2)..(2): 2' O-methyl modified
  misc_feature (2)..(3): Phosphorothioate linkage
  modified_base (3)..(3): 2' fluoro-modified
  modified_base (4)..(4): 2' O-methyl modified
  modified_base (5)..(5): 2' fluoro-modified
  modified_base (6)..(6): 2' O-methyl modified
  modified_base (7)..(7): 2' fluoro-modified
  modified_base (8)..(8): 2' fluoro-modified
  modified_base (9)..(9): 2' fluoro-modified
  modified_base (10)..(10): 2' O-methyl modified
  modified_base (11)..(11): 2' fluoro-modified
  modified_base (12)..(12): 2' O-methyl modified
  modified_base (13)..(13): 2' fluoro-modified
  modified_base (14)..(14): 2' O-methyl modified
  modified_base (15)..(15): 2' fluoro-modified
  modified_base (16)..(16): 2' O-methyl modified
  modified_base (17)..(17): 2' fluoro-modified
  modified_base (18)..(18): 2' O-methyl modified
  modified_base (19)..(19): 2' fluoro-modified
  misc_feature (19)..(20): Phosphorothioate linkage
  modified_base (20)..(20): 2' O-methyl modified
  misc_feature (20)..(21): Phosphorothioate linkage
  modified_base (21)..(21): 2' O-methyl modified
ugauccgauucuuuccagauu

SEQ ID NO: 14014 - RNA, 21 nt, Artificial Sequence
  Description of Artificial Sequence: Synthetic oligonucleotide
  modified_base (1)..(1): 2' fluoro-modified
  misc_feature (1)..(2): Phosphorothioate linkage
  modified_base (2)..(2): 2' O-methyl modified
  misc_feature (2)..(3): Phosphorothioate linkage
  modified_base (3)..(3): 2' fluoro-modified
  modified_base (4)..(4): 2' O-methyl modified
  modified_base (5)..(5): 2' fluoro-modified
  modified_base (6)..(6): 2' O-methyl modified
  modified_base (7)..(7): 2' fluoro-modified
  modified_base (8)..(8): 2' fluoro-modified
  modified_base (9)..(9): 2' fluoro-modified
  modified_base (10)..(10): 2' O-methyl modified
  modified_base (11)..(11): 2' fluoro-modified
  modified_base (12)..(12): 2' O-methyl modified
  modified_base (13)..(13): 2' fluoro-modified
  modified_base (14)..(14): 2' O-methyl modified
  modified_base (15)..(15): 2' fluoro-modified
  modified_base (16)..(16): 2' O-methyl modified
  modified_base (17)..(17): 2' fluoro-modified
  modified_base (18)..(18): 2' O-methyl modified
  modified_base (19)..(19): 2' fluoro-modified
  misc_feature (19)..(20): Phosphorothioate linkage
  modified_base (20)..(20): 2' O-methyl modified
  misc_feature (20)..(21): Phosphorothioate linkage
  modified_base (21)..(21): 2' O-methyl modified
gauccgauucuuuccagcauu

SEQ ID NO: 14015 - RNA, 21 nt, Artificial Sequence
  Description of Artificial Sequence: Synthetic oligonucleotide
  modified_base (1)..(1): 2' fluoro-modified
  misc_feature (1)..(2): Phosphorothioate linkage
  modified_base (2)..(2): 2' O-methyl modified
  misc_feature (2)..(3): Phosphorothioate linkage
  modified_base (3)..(3): 2' fluoro-modified
  modified_base (4)..(4): 2' O-methyl modified
  modified_base (5)..(5): 2' fluoro-modified
  modified_base (6)..(6): 2' O-methyl modified
  modified_base (7)..(7): 2' fluoro-modified
  modified_base (8)..(8): 2' fluoro-modified
  modified_base (9)..(9): 2' fluoro-modified
  modified_base (10)..(10): 2' O-methyl modified
  modified_base (11)..(11): 2' fluoro-modified
  modified_base (12)..(12): 2' O-methyl modified
  modified_base (13)..(13): 2' fluoro-modified
  modified_base (14)..(14): 2' O-methyl modified
  modified_base (15)..(15): 2' fluoro-modified
  modified_base (16)..(16): 2' O-methyl modified
  modified_base (17)..(17): 2' fluoro-modified
  modified_base (18)..(18): 2' O-methyl modified
  modified_base (19)..(19): 2' fluoro-modified
  misc_feature (19)..(20): Phosphorothioate linkage
  modified_base (20)..(20): 2' O-methyl modified
  misc_feature (20)..(21): Phosphorothioate linkage
  modified_base (21)..(21): 2' O-methyl modified
auccgauucuuuccagcgauu

SEQ ID NO: 14016 - RNA, 21 nt, Artificial Sequence
  Description of Artificial Sequence: Synthetic oligonucleotide
  modified_base (1)..(1): 2' fluoro-modified
  misc_feature (1)..(2): Phosphorothioate linkage
  modified_base (2)..(2): 2' O-methyl modified
  misc_feature (2)..(3): Phosphorothioate linkage
  modified_base (3)..(3): 2' fluoro-modified
  modified_base (4)..(4): 2' O-methyl modified
  modified_base (5)..(5): 2' fluoro-modified
  modified_base (6)..(6): 2' O-methyl modified
  modified_base (7)..(7): 2' fluoro-modified
  modified_base (8)..(8): 2' fluoro-modified
  modified_base (9)..(9): 2' fluoro-modified
  modified_base (10)..(10): 2' O-methyl modified
  modified_base (11)..(11): 2' fluoro-modified
  modified_base (12)..(12): 2' O-methyl modified
  modified_base (13)..(13): 2' fluoro-modified
  modified_base (14)..(14): 2' O-methyl modified
  modified_base (15)..(15): 2' fluoro-modified
  modified_base (16)..(16): 2' O-methyl modified
  modified_base (17)..(17): 2' fluoro-modified
  modified_base (18)..(18): 2' O-methyl modified
  modified_base (19)..(19): 2' fluoro-modified
  misc_feature (19)..(20): Phosphorothioate linkage
  modified_base (20)..(20): 2' O-methyl modified
  misc_feature (20)..(21): Phosphorothioate linkage
  modified_base (21)..(21): 2' O-methyl modified
uucugcaaccaagcggguauu

SEQ ID NO: 14017 - RNA, 21 nt, Artificial Sequence
  Description of Artificial Sequence: Synthetic oligonucleotide
  modified_base (1)..(1): 2' fluoro-modified
  misc_feature (1)..(2): Phosphorothioate linkage
  modified_base (2)..(2): 2' O-methyl modified
  misc_feature (2)..(3): Phosphorothioate linkage
  modified_base (3)..(3): 2' fluoro-modified
  modified_base (4)..(4): 2' O-methyl modified
  modified_base (5)..(5): 2' fluoro-modified
  modified_base (6)..(6): 2' O-methyl modified
  modified_base (7)..(7): 2' fluoro-modified
  modified_base (8)..(8): 2' fluoro-modified
  modified_base (9)..(9): 2' fluoro-modified
  modified_base (10)..(10): 2' O-methyl modified
  modified_base (11)..(11): 2' fluoro-modified
  modified_base (12)..(12): 2' O-methyl modified
  modified_base (13)..(13): 2' fluoro-modified
  modified_base (14)..(14): 2' O-methyl modified
  modified_base (15)..(15): 2' fluoro-modified
  modified_base (16)..(16): 2' O-methyl modified
  modified_base (17)..(17): 2' fluoro-modified
  modified_base (18)..(18): 2' O-methyl modified
  modified_base (19)..(19): 2' fluoro-modified
  misc_feature (19)..(20): Phosphorothioate linkage
  modified_base (20)..(20): 2' O-methyl modified
  misc_feature (20)..(21): Phosphorothioate linkage
  modified_base (21)..(21): 2' O-methyl modified
acguccccgagaguccccauu

SEQ ID NO: 14018 - RNA, 21 nt, Artificial Sequence
  Description of Artificial Sequence: Synthetic oligonucleotide
  modified_base (1)..(1): 2' fluoro-modified
  misc_feature (1)..(2): Phosphorothioate linkage
  modified_base (2)..(2): 2' O-methyl modified
  misc_feature (2)..(3): Phosphorothioate linkage
  modified_base (3)..(3): 2' fluoro-modified
  modified_base (4)..(4): 2' O-methyl modified
  modified_base (5)..(5): 2' fluoro-modified
  modified_base (6)..(6): 2' O-methyl modified
  modified_base (7)..(7): 2' fluoro-modified
  modified_base (8)..(8): 2' fluoro-modified
  modified_base (9)..(9): 2' fluoro-modified
  modified_base (10)..(10): 2' O-methyl modified
  modified_base (11)..(11): 2' fluoro-modified
  modified_base (12)..(12): 2' O-methyl modified
  modified_base (13)..(13): 2' fluoro-modified
  modified_base (14)..(14): 2' O-methyl modified
  modified_base (15)..(15): 2' fluoro-modified
  modified_base (16)..(16): 2' O-methyl modified
  modified_base (17)..(17): 2' fluoro-modified
  modified_base (18)..(18): 2' O-methyl modified
  modified_base (19)..(19): 2' fluoro-modified
  misc_feature (19)..(20): Phosphorothioate linkage
  modified_base (20)..(20): 2' O-methyl modified
  misc_feature (20)..(21): Phosphorothioate linkage
  modified_base (21)..(21): 2' O-methyl modified
ugcguccugggacgagauauu

SEQ ID NO: 14019 - RNA, 21 nt, Artificial Sequence
  Description of Artificial Sequence: Synthetic oligonucleotide
  modified_base (1)..(1): 2' fluoro-modified
  misc_feature (1)..(2): Phosphorothioate linkage
  modified_base (2)..(2): 2' O-methyl modified
  misc_feature (2)..(3): Phosphorothioate linkage
  modified_base (3)..(3): 2' fluoro-modified
  modified_base (4)..(4): 2' O-methyl modified
  modified_base (5)..(5): 2' fluoro-modified
  modified_base (6)..(6): 2' O-methyl modified
  modified_base (7)..(7): 2' fluoro-modified
  modified_base (8)..(8): 2' fluoro-modified
  modified_base (9)..(9): 2' fluoro-modified
  modified_base (10)..(10): 2' O-methyl modified
  modified_base (11)..(11): 2' fluoro-modified
  modified_base (12)..(12): 2' O-methyl modified
  modified_base (13)..(13): 2' fluoro-modified
  modified_base (14)..(14): 2' O-methyl modified
  modified_base (15)..(15): 2' fluoro-modified
  modified_base (16)..(16): 2' O-methyl modified
  modified_base (17)..(17): 2' fluoro-modified
  modified_base (18)..(18): 2' O-methyl modified
  modified_base (19)..(19): 2' fluoro-modified
  misc_feature (19)..(20): Phosphorothioate linkage
  modified_base (20)..(20): 2' O-methyl modified
  misc_feature (20)..(21): Phosphorothioate linkage
  modified_base (21)..(21): 2' O-methyl modified
gggacgagaugaauguccauu

SEQ ID NO: 14020 - RNA, 21 nt, Artificial Sequence
  Description of Artificial Sequence: Synthetic oligonucleotide
  modified_base (1)..(1): 2' fluoro-modified
  misc_feature (1)..(2): Phosphorothioate linkage
  modified_base (2)..(2): 2' O-methyl modified
  misc_feature (2)..(3): Phosphorothioate linkage
  modified_base (3)..(3): 2' fluoro-modified
  modified_base (4)..(4): 2' O-methyl modified
  modified_base (5)..(5): 2' fluoro-modified
  modified_base (6)..(6): 2' O-methyl modified
  modified_base (7)..(7): 2' fluoro-modified
  modified_base (8)..(8): 2' fluoro-modified
  modified_base (9)..(9): 2' fluoro-modified
  modified_base (10)..(10): 2' O-methyl modified
  modified_base (11)..(11): 2' fluoro-modified
  modified_base (12)..(12): 2' O-methyl modified
  modified_base (13)..(13): 2' fluoro-modified
  modified_base (14)..(14): 2' O-methyl modified
  modified_base (15)..(15): 2' fluoro-modified
  modified_base (16)..(16): 2' O-methyl modified
  modified_base (17)..(17): 2' fluoro-modified
  modified_base (18)..(18): 2' O-methyl modified
  modified_base (19)..(19): 2' fluoro-modified
  misc_feature (19)..(20): Phosphorothioate linkage
  modified_base (20)..(20): 2' O-methyl modified
  misc_feature (20)..(21): Phosphorothioate linkage
  modified_base (21)..(21): 2' O-methyl modified
gacgagaugaauguccugauu

SEQ ID NO: 14021 - RNA, 21 nt, Artificial Sequence
  Description of Artificial Sequence: Synthetic oligonucleotide
  modified_base (1)..(1): 2' fluoro-modified
  misc_feature (1)..(2): Phosphorothioate linkage
  modified_base (2)..(2): 2' O-methyl modified
  misc_feature (2)..(3): Phosphorothioate linkage
  modified_base (3)..(3): 2' fluoro-modified
  modified_base (4)..(4): 2' O-methyl modified
  modified_base (5)..(5): 2' fluoro-modified
  modified_base (6)..(6): 2' O-methyl modified
  modified_base (7)..(7): 2' fluoro-modified
  modified_base (8)..(8): 2' fluoro-modified
  modified_base (9)..(9): 2' fluoro-modified
  modified_base (10)..(10): 2' O-methyl modified
  modified_base (11)..(11): 2' fluoro-modified
  modified_base (12)..(12): 2' O-methyl modified
  modified_base (13)..(13): 2' fluoro-modified
  modified_base (14)..(14): 2' O-methyl modified
  modified_base (15)..(15): 2' fluoro-modified
  modified_base (16)..(16): 2' O-methyl modified
  modified_base (17)..(17): 2' fluoro-modified
  modified_base (18)..(18): 2' O-methyl modified
  modified_base (19)..(19): 2' fluoro-modified
  misc_feature (19)..(20): Phosphorothioate linkage
  modified_base (20)..(20): 2' O-methyl modified
  misc_feature (20)..(21): Phosphorothioate linkage
  modified_base (21)..(21): 2' O-methyl modified
ugaauguccuggcgcacgauu

SEQ ID NO: 14022 - RNA, 21 nt, Artificial Sequence
  Description of Artificial Sequence: Synthetic oligonucleotide
  modified_base (1)..(1): 2' fluoro-modified
  misc_feature (1)..(2): Phosphorothioate linkage
  modified_base (2)..(2): 2' O-methyl modified
  misc_feature (2)..(3): Phosphorothioate linkage
  modified_base (3)..(3): 2' fluoro-modified
  modified_base (4)..(4): 2' O-methyl modified
  modified_base (5)..(5): 2' fluoro-modified
  modified_base (6)..(6): 2' O-methyl modified
  modified_base (7)..(7): 2' fluoro-modified
  modified_base (8)..(8): 2' fluoro-modified
  modified_base (9)..(9): 2' fluoro-modified
  modified_base (10)..(10): 2' O-methyl modified
  modified_base (11)..(11): 2' fluoro-modified
  modified_base (12)..(12): 2' O-methyl modified
  modified_base (13)..(13): 2' fluoro-modified
  modified_base (14)..(14): 2' O-methyl modified
  modified_base (15)..(15): 2' fluoro-modified
  modified_base (16)..(16): 2' O-methyl modified
  modified_base (17)..(17): 2' fluoro-modified
  modified_base (18)..(18): 2' O-methyl modified
  modified_base (19)..(19): 2' fluoro-modified
  misc_feature (19)..(20): Phosphorothioate linkage
  modified_base (20)..(20): 2' O-methyl modified
  misc_feature (20)..(21): Phosphorothioate linkage
  modified_base (21)..(21): 2' O-methyl modified
gaauguccuggcgcacggauu

SEQ ID NO: 14023 - RNA, 21 nt, Artificial Sequence
  Description of Artificial Sequence: Synthetic oligonucleotide
  modified_base (1)..(1): 2' fluoro-modified
  misc_feature (1)..(2): Phosphorothioate linkage
  modified_base (2)..(2): 2' O-methyl modified
  misc_feature (2)..(3): Phosphorothioate linkage
  modified_base (3)..(3): 2' fluoro-modified
  modified_base (4)..(4): 2' O-methyl modified
  modified_base (5)..(5): 2' fluoro-modified
  modified_base (6)..(6): 2' O-methyl modified
  modified_base (7)..(7): 2' fluoro-modified
  modified_base (8)..(8): 2' fluoro-modified
  modified_base (9)..(9): 2' fluoro-modified
  modified_base (10)..(10): 2' O-methyl modified
  modified_base (11)..(11): 2' fluoro-modified
  modified_base (12)..(12): 2' O-methyl modified
  modified_base (13)..(13): 2' fluoro-modified
  modified_base (14)..(14): 2' O-methyl modified
  modified_base (15)..(15): 2' fluoro-modified
  modified_base (16)..(16): 2' O-methyl modified
  modified_base (17)..(17): 2' fluoro-modified
  modified_base (18)..(18): 2' O-methyl modified
  modified_base (19)..(19): 2' fluoro-modified
  misc_feature (19)..(20): Phosphorothioate linkage
  modified_base (20)..(20): 2' O-methyl modified
  misc_feature (20)..(21): Phosphorothioate linkage
  modified_base (21)..(21): 2' O-methyl modified
aauguccuggcgcacggaauu

SEQ ID NO: 14024 - RNA, 21 nt, Artificial Sequence
  Description of Artificial Sequence: Synthetic oligonucleotide
  modified_base (1)..(1): 2' fluoro-modified
  misc_feature (1)..(2): Phosphorothioate linkage
  modified_base (2)..(2): 2' O-methyl modified
  misc_feature (2)..(3): Phosphorothioate linkage
  modified_base (3)..(3): 2' fluoro-modified
  modified_base (4)..(4): 2' O-methyl modified
  modified_base (5)..(5): 2' fluoro-modified
  modified_base (6)..(6): 2' O-methyl modified
  modified_base (7)..(7): 2' fluoro-modified
  modified_base (8)..(8): 2' fluoro-modified
  modified_base (9)..(9): 2' fluoro-modified
  modified_base (10)..(10): 2' O-methyl modified
  modified_base (11)..(11): 2' fluoro-modified
  modified_base (12)..(12): 2' O-methyl modified
  modified_base (13)..(13): 2' fluoro-modified
  modified_base (14)..(14): 2' O-methyl modified
  modified_base (15)..(15): 2' fluoro-modified
  modified_base (16)..(16): 2' O-methyl modified
  modified_base (17)..(17): 2' fluoro-modified
  modified_base (18)..(18): 2' O-methyl modified
  modified_base (19)..(19): 2' fluoro-modified
  misc_feature (19)..(20): Phosphorothioate linkage
  modified_base (20)..(20): 2' O-methyl modified
  misc_feature (20)..(21): Phosphorothioate linkage
  modified_base (21)..(21): 2' O-methyl modified
auguccuggcgcacggacauu

SEQ ID NO: 14025 - RNA, 21 nt, Artificial Sequence
  Description of Artificial Sequence: Synthetic oligonucleotide
  modified_base (1)..(1): 2' fluoro-modified
  misc_feature (1)..(2): Phosphorothioate linkage
  modified_base (2)..(2): 2' O-methyl modified
  misc_feature (2)..(3): Phosphorothioate linkage
  modified_base (3)..(3): 2' fluoro-modified
  modified_base (4)..(4): 2' O-methyl modified
  modified_base (5)..(5): 2' fluoro-modified
  modified_base (6)..(6): 2' O-methyl modified
  modified_base (7)..(7): 2' fluoro-modified
  modified_base (8)..(8): 2' fluoro-modified
  modified_base (9)..(9): 2' fluoro-modified
  modified_base (10)..(10): 2' O-methyl modified
  modified_base (11)..(11): 2' fluoro-modified
  modified_base (12)..(12): 2' O-methyl modified
  modified_base (13)..(13): 2' fluoro-modified
  modified_base (14)..(14): 2' O-methyl modified
  modified_base (15)..(15): 2' fluoro-modified
  modified_base (16)..(16): 2' O-methyl modified
  modified_base (17)..(17): 2' fluoro-modified
  modified_base (18)..(18): 2' O-methyl modified
  modified_base (19)..(19): 2' fluoro-modified
  misc_feature (19)..(20): Phosphorothioate linkage
  modified_base (20)..(20): 2' O-methyl modified
  misc_feature (20)..(21): Phosphorothioate linkage
  modified_base (21)..(21): 2' O-methyl modified
uguccuggcgcacggacuauu

SEQ ID NO: 14026 - RNA, 21 nt, Artificial Sequence
  Description of Artificial Sequence: Synthetic oligonucleotide
  modified_base (1)..(1): 2' fluoro-modified
  misc_feature (1)..(2): Phosphorothioate linkage
  modified_base (2)..(2): 2' O-methyl modified
  misc_feature (2)..(3): Phosphorothioate linkage
  modified_base (3)..(3): 2' fluoro-modified
  modified_base (4)..(4): 2' O-methyl modified
  modified_base (5)..(5): 2' fluoro-modified
  modified_base (6)..(6): 2' O-methyl modified
  modified_base (7)..(7): 2' fluoro-modified
  modified_base (8)..(8): 2' fluoro-modified
  modified_base (9)..(9): 2' fluoro-modified
  modified_base (10)..(10): 2' O-methyl modified
  modified_base (11)..(11): 2' fluoro-modified
  modified_base (12)..(12): 2' O-methyl modified
  modified_base (13)..(13): 2' fluoro-modified
  modified_base (14)..(14): 2' O-methyl modified
  modified_base (15)..(15): 2' fluoro-modified
  modified_base (16)..(16): 2' O-methyl modified
  modified_base (17)..(17): 2' fluoro-modified
  modified_base (18)..(18): 2' O-methyl modified
  modified_base (19)..(19): 2' fluoro-modified
  misc_feature (19)..(20): Phosphorothioate linkage
  modified_base (20)..(20): 2' O-methyl modified
  misc_feature (20)..(21): Phosphorothioate linkage
  modified_base (21)..(21): 2' O-methyl modified
ggccaggggcugcgcgaaauu

SEQ ID NO: 14027 - RNA, 21 nt, Artificial Sequence
  Description of Artificial Sequence: Synthetic oligonucleotide
  modified_base (1)..(1): 2' fluoro-modified
  misc_feature (1)..(2): Phosphorothioate linkage
  modified_base (2)..(2): 2' O-methyl modified
  misc_feature (2)..(3): Phosphorothioate linkage
  modified_base (3)..(3): 2' fluoro-modified
  modified_base (4)..(4): 2' O-methyl modified
  modified_base (5)..(5): 2' fluoro-modified
  modified_base (6)..(6): 2' O-methyl modified
  modified_base (7)..(7): 2' fluoro-modified
  modified_base (8)..(8): 2' fluoro-modified
  modified_base (9)..(9): 2' fluoro-modified
  modified_base (10)..(10): 2' O-methyl modified
  modified_base (11)..(11): 2' fluoro-modified
  modified_base (12)..(12): 2' O-methyl modified
  modified_base (13)..(13): 2' fluoro-modified
  modified_base (14)..(14): 2' O-methyl modified
  modified_base (15)..(15): 2' fluoro-modified
  modified_base (16)..(16): 2' O-methyl modified
  modified_base (17)..(17): 2' fluoro-modified
  modified_base (18)..(18): 2' O-methyl modified
  modified_base (19)..(19): 2' fluoro-modified
  misc_feature (19)..(20): Phosphorothioate linkage
  modified_base (20)..(20): 2' O-methyl modified
  misc_feature (20)..(21): Phosphorothioate linkage
  modified_base (21)..(21): 2' O-methyl modified
ccaggggcugcgcgaacaauu

SEQ ID NO: 14028 - RNA, 21 nt, Artificial Sequence
  Description of Artificial Sequence: Synthetic oligonucleotide
  modified_base (1)..(1): 2' fluoro-modified
  misc_feature (1)..(2): Phosphorothioate linkage
  modified_base (2)..(2): 2' O-methyl modified
  misc_feature (2)..(3): Phosphorothioate linkage
  modified_base (3)..(3): 2' fluoro-modified
  modified_base (4)..(4): 2' O-methyl modified
  modified_base (5)..(5): 2' fluoro-modified
  modified_base (6)..(6): 2' O-methyl modified
  modified_base (7)..(7): 2' fluoro-modified
  modified_base (8)..(8): 2' fluoro-modified
  modified_base (9)..(9): 2' fluoro-modified
  modified_base (10)..(10): 2' O-methyl modified
  modified_base (11)..(11): 2' fluoro-modified
  modified_base (12)..(12): 2' O-methyl modified
  modified_base (13)..(13): 2' fluoro-modified
  modified_base (14)..(14): 2' O-methyl modified
  modified_base (15)..(15): 2' fluoro-modified
  modified_base (16)..(16): 2' O-methyl modified
  modified_base (17)..(17): 2' fluoro-modified
  modified_base (18)..(18): 2' O-methyl modified
  modified_base (19)..(19): 2' fluoro-modified
  misc_feature (19)..(20): Phosphorothioate linkage
  modified_base (20)..(20): 2' O-methyl modified
  misc_feature (20)..(21): Phosphorothioate linkage
  modified_base (21)..(21): 2' O-methyl modified
ggggcugcgcgaacacgcauu

SEQ ID NO: 14029 - RNA, 21 nt, Artificial Sequence
  Description of Artificial Sequence: Synthetic oligonucleotide
  modified_base (1)..(1): 2' fluoro-modified
  misc_feature (1)..(2): Phosphorothioate linkage
  modified_base (2)..(2): 2' O-methyl modified
  misc_feature (2)..(3): Phosphorothioate linkage
  modified_base (3)..(3): 2' fluoro-modified
  modified_base (4)..(4): 2' O-methyl modified
  modified_base (5)..(5): 2' fluoro-modified
  modified_base (6)..(6): 2' O-methyl modified
  modified_base (7)..(7): 2' fluoro-modified
  modified_base (8)..(8): 2' fluoro-modified
  modified_base (9)..(9): 2' fluoro-modified
  modified_base (10)..(10): 2' O-methyl modified
  modified_base (11)..(11): 2' fluoro-modified
  modified_base (12)..(12): 2' O-methyl modified
  modified_base (13)..(13): 2' fluoro-modified
  modified_base (14)..(14): 2' O-methyl modified
  modified_base (15)..(15): 2' fluoro-modified
  modified_base (16)..(16): 2' O-methyl modified
  modified_base (17)..(17): 2' fluoro-modified
  modified_base (18)..(18): 2' O-methyl modified
  modified_base (19)..(19): 2' fluoro-modified
  misc_feature (19)..(20): Phosphorothioate linkage
  modified_base (20)..(20): 2' O-methyl modified
  misc_feature (20)..(21): Phosphorothioate linkage
  modified_base (21)..(21): 2' O-methyl modified
ggcugcgcgaacacgcggauu

SEQ ID NO: 14030 - RNA, 21 nt, Artificial Sequence
  Description of Artificial Sequence: Synthetic oligonucleotide
  modified_base (1)..(1): 2' fluoro-modified
  misc_feature (1)..(2): Phosphorothioate linkage
  modified_base (2)..(2): 2' O-methyl modified
  misc_feature (2)..(3): Phosphorothioate linkage
  modified_base (3)..(3): 2' fluoro-modified
  modified_base (4)..(4): 2' O-methyl modified
  modified_base (5)..(5): 2' fluoro-modified
  modified_base (6)..(6): 2' O-methyl modified
  modified_base (7)..(7): 2' fluoro-modified
  modified_base (8)..(8): 2' fluoro-modified
  modified_base (9)..(9): 2' fluoro-modified
  modified_base (10)..(10): 2' O-methyl modified
  modified_base (11)..(11): 2' fluoro-modified
  modified_base (12)..(12): 2' O-methyl modified
  modified_base (13)..(13): 2' fluoro-modified
  modified_base (14)..(14): 2' O-methyl modified
  modified_base (15)..(15): 2' fluoro-modified
  modified_base (16)..(16): 2' O-methyl modified
  modified_base (17)..(17): 2' fluoro-modified
  modified_base (18)..(18): 2' O-methyl modified
  modified_base (19)..(19): 2' fluoro-modified
  misc_feature (19)..(20): Phosphorothioate linkage
  modified_base (20)..(20): 2' O-methyl modified
  misc_feature (20)..(21): Phosphorothioate linkage
  modified_base (21)..(21): 2' O-methyl modified
gcugcgcgaacacgcggaauu

SEQ ID NO: 14031 - RNA, 21 nt, Artificial Sequence
  Description of Artificial Sequence: Synthetic oligonucleotide
  modified_base (1)..(1): 2' fluoro-modified
  misc_feature (1)..(2): Phosphorothioate linkage
  modified_base (2)..(2): 2' O-methyl modified
  misc_feature (2)..(3): Phosphorothioate linkage
  modified_base (3)..(3): 2' fluoro-modified
  modified_base (4)..(4): 2' O-methyl modified
  modified_base (5)..(5): 2' fluoro-modified
  modified_base (6)..(6): 2' O-methyl modified
  modified_base (7)..(7): 2' fluoro-modified
  modified_base (8)..(8): 2' fluoro-modified
  modified_base (9)..(9): 2' fluoro-modified
  modified_base (10)..(10): 2' O-methyl modified
  modified_base (11)..(11): 2' fluoro-modified
  modified_base (12)..(12): 2' O-methyl modified
  modified_base (13)..(13): 2' fluoro-modified
  modified_base (14)..(14): 2' O-methyl modified
  modified_base (15)..(15): 2' fluoro-modified
  modified_base (16)..(16): 2' O-methyl modified
  modified_base (17)..(17): 2' fluoro-modified
  modified_base (18)..(18): 2' O-methyl modified
  modified_base (19)..(19): 2' fluoro-modified
  misc_feature (19)..(20): Phosphorothioate linkage
  modified_base (20)..(20): 2' O-methyl modified
  misc_feature (20)..(21): Phosphorothioate linkage
  modified_base (21)..(21): 2' O-methyl modified
cugcgcgaacacgcggagauu

SEQ ID NO: 14032 - RNA, 21 nt, Artificial Sequence
  Description of Artificial Sequence: Synthetic oligonucleotide
  modified_base (1)..(1): 2' fluoro-modified
  misc_feature (1)..(2): Phosphorothioate linkage
  modified_base (2)..(2): 2' O-methyl modified
  misc_feature (2)..(3): Phosphorothioate linkage
  modified_base (3)..(3): 2' fluoro-modified
  modified_base (4)..(4): 2' O-methyl modified
  modified_base (5)..(5): 2' fluoro-modified
  modified_base (6)..(6): 2' O-methyl modified
  modified_base (7)..(7): 2' fluoro-modified
  modified_base (8)..(8): 2' fluoro-modified
  modified_base (9)..(9): 2' fluoro-modified
  modified_base (10)..(10): 2' O-methyl modified
  modified_base (11)..(11): 2' fluoro-modified
  modified_base (12)..(12): 2' O-methyl modified
  modified_base (13)..(13): 2' fluoro-modified
  modified_base (14)..(14): 2' O-methyl modified
  modified_base (15)..(15): 2' fluoro-modified
  modified_base (16)..(16): 2' O-methyl modified
  modified_base (17)..(17): 2' fluoro-modified
  modified_base (18)..(18): 2' O-methyl modified
  modified_base (19)..(19): 2' fluoro-modified
  misc_feature (19)..(20): Phosphorothioate linkage
  modified_base (20)..(20): 2' O-methyl modified
  misc_feature (20)..(21): Phosphorothioate linkage
  modified_base (21)..(21): 2' O-methyl modified
ugcgcgaacacgcggagcauu

SEQ ID NO: 14033 - RNA, 21 nt, Artificial Sequence
  Description of Artificial Sequence: Synthetic oligonucleotide
  modified_base (1)..(1): 2' fluoro-modified
  misc_feature (1)..(2): Phosphorothioate linkage
  modified_base (2)..(2): 2' O-methyl modified
  misc_feature (2)..(3): Phosphorothioate linkage
  modified_base (3)..(3): 2' fluoro-modified
  modified_base (4)..(4): 2' O-methyl modified
  modified_base (5)..(5): 2' fluoro-modified
  modified_base (6)..(6): 2' O-methyl modified
  modified_base (7)..(7): 2' fluoro-modified
  modified_base (8)..(8): 2' fluoro-modified
  modified_base (9)..(9): 2' fluoro-modified
  modified_base (10)..(10): 2' O-methyl modified
  modified_base (11)..(11): 2' fluoro-modified
  modified_base (12)..(12): 2' O-methyl modified
  modified_base (13)..(13): 2' fluoro-modified
  modified_base (14)..(14): 2' O-methyl modified
  modified_base (15)..(15): 2' fluoro-modified
  modified_base (16)..(16): 2' O-methyl modified
  modified_base (17)..(17): 2' fluoro-modified
  modified_base (18)..(18): 2' O-methyl modified
  modified_base (19)..(19): 2' fluoro-modified
  misc_feature (19)..(20): Phosphorothioate linkage
  modified_base (20)..(20): 2' O-methyl modified
  misc_feature (20)..(21): Phosphorothioate linkage
  modified_base (21)..(21): 2' O-methyl modified
gcgcgaacacgcggagcgauu

SEQ ID NO: 14034 - RNA, 21 nt, Artificial Sequence
  Description of Artificial Sequence: Synthetic oligonucleotide
  modified_base (1)..(1): 2' fluoro-modified
  misc_feature (1)..(2): Phosphorothioate linkage
  modified_base (2)..(2): 2' O-methyl modified
  misc_feature (2)..(3): Phosphorothioate linkage
  modified_base (3)..(3): 2' fluoro-modified
  modified_base (4)..(4): 2' O-methyl modified
  modified_base (5)..(5): 2' fluoro-modified
  modified_base (6)..(6): 2' O-methyl modified
  modified_base (7)..(7): 2' fluoro-modified
  modified_base (8)..(8): 2' fluoro-modified
  modified_base (9)..(9): 2' fluoro-modified
  modified_base (10)..(10): 2' O-methyl modified
  modified_base (11)..(11): 2' fluoro-modified
  modified_base (12)..(12): 2' O-methyl modified
  modified_base (13)..(13): 2' fluoro-modified
  modified_base (14)..(14): 2' O-methyl modified
  modified_base (15)..(15): 2' fluoro-modified
  modified_base (16)..(16): 2' O-methyl modified
  modified_base (17)..(17): 2' fluoro-modified
  modified_base (18)..(18): 2' O-methyl modified
  modified_base (19)..(19): 2' fluoro-modified
  misc_feature (19)..(20): Phosphorothioate linkage
  modified_base (20)..(20): 2' O-methyl modified
  misc_feature (20)..(21): Phosphorothioate linkage
  modified_base (21)..(21): 2' O-methyl modified
cgcgaacacgcggagcgcauu

SEQ ID NO: 14035 - RNA, 21 nt, Artificial Sequence
  Description of Artificial Sequence: Synthetic oligonucleotide
  modified_base (1)..(1): 2' fluoro-modified
  misc_feature (1)..(2): Phosphorothioate linkage
  modified_base (2)..(2): 2' O-methyl modified
  misc_feature (2)..(3): Phosphorothioate linkage
  modified_base (3)..(3): 2' fluoro-modified
  modified_base (4)..(4): 2' O-methyl modified
  modified_base (5)..(5): 2' fluoro-modified
  modified_base (6)..(6): 2' O-methyl modified
  modified_base (7)..(7): 2' fluoro-modified
  modified_base (8)..(8): 2' fluoro-modified
  modified_base (9)..(9): 2' fluoro-modified
  modified_base (10)..(10): 2' O-methyl modified
  modified_base (11)..(11): 2' fluoro-modified
  modified_base (12)..(12): 2' O-methyl modified
  modified_base (13)..(13): 2' fluoro-modified
  modified_base (14)..(14): 2' O-methyl modified
  modified_base (15)..(15): 2' fluoro-modified
  modified_base (16)..(16): 2' O-methyl modified
  modified_base (17)..(17): 2' fluoro-modified
  modified_base (18)..(18): 2' O-methyl modified
  modified_base (19)..(19): 2' fluoro-modified
  misc_feature (19)..(20): Phosphorothioate linkage
  modified_base (20)..(20): 2' O-methyl modified
  misc_feature (20)..(21): Phosphorothioate linkage
  modified_base (21)..(21): 2' O-methyl modified
gcgaacacgcggagcgcaauu

SEQ ID NO: 14036 - RNA, 21 nt, Artificial Sequence
  Description of Artificial Sequence: Synthetic oligonucleotide
  modified_base (1)..(1): 2' fluoro-modified
  misc_feature (1)..(2): Phosphorothioate linkage
  modified_base (2)..(2): 2' O-methyl modified
  misc_feature (2)..(3): Phosphorothioate linkage
  modified_base (3)..(3): 2' fluoro-modified
  modified_base (4)..(4): 2' O-methyl modified
  modified_base (5)..(5): 2' fluoro-modified
  modified_base (6)..(6): 2' O-methyl modified
  modified_base (7)..(7): 2' fluoro-modified
  modified_base (8)..(8): 2' fluoro-modified
  modified_base (9)..(9): 2' fluoro-modified
  modified_base (10)..(10): 2' O-methyl modified
  modified_base (11)..(11): 2' fluoro-modified
  modified_base (12)..(12): 2' O-methyl modified
  modified_base (13)..(13): 2' fluoro-modified
  modified_base (14)..(14): 2' O-methyl modified
  modified_base (15)..(15): 2' fluoro-modified
  modified_base (16)..(16): 2' O-methyl modified
  modified_base (17)..(17): 2' fluoro-modified
  modified_base (18)..(18): 2' O-methyl modified
  modified_base (19)..(19): 2' fluoro-modified
  misc_feature (19)..(20): Phosphorothioate linkage
  modified_base (20)..(20): 2' O-methyl modified
  misc_feature (20)..(21): Phosphorothioate linkage
  modified_base (21)..(21): 2' O-methyl modified
cgaacacgcggagcgcacauu

SEQ ID NO: 14037 - RNA, 21 nt, Artificial Sequence
  Description of Artificial Sequence: Synthetic oligonucleotide
  modified_base (1)..(1): 2' fluoro-modified
  misc_feature (1)..(2): Phosphorothioate linkage
  modified_base (2)..(2): 2' O-methyl modified
  misc_feature (2)..(3): Phosphorothioate linkage
  modified_base (3)..(3): 2' fluoro-modified
  modified_base (4)..(4): 2' O-methyl modified
  modified_base (5)..(5): 2' fluoro-modified
  modified_base (6)..(6): 2' O-methyl modified
  modified_base (7)..(7): 2' fluoro-modified
  modified_base (8)..(8): 2' fluoro-modified
  modified_base (9)..(9): 2' fluoro-modified
  modified_base (10)..(10): 2' O-methyl modified
  modified_base (11)..(11): 2' fluoro-modified
  modified_base (12)..(12): 2' O-methyl modified
  modified_base (13)..(13): 2' fluoro-modified
  modified_base (14)..(14): 2' O-methyl modified
  modified_base (15)..(15): 2' fluoro-modified
  modified_base (16)..(16): 2' O-methyl modified
  modified_base (17)..(17): 2' fluoro-modified
  modified_base (18)..(18): 2' O-methyl modified
  modified_base (19)..(19): 2' fluoro-modified
  misc_feature (19)..(20): Phosphorothioate linkage
  modified_base (20)..(20): 2' O-methyl modified
  misc_feature (20)..(21): Phosphorothioate linkage
  modified_base (21)..(21): 2' O-methyl modified
aacacgcggagcgcacccauu

SEQ ID NO: 14038 - RNA, 21 nt, Artificial Sequence
  Description of Artificial Sequence: Synthetic oligonucleotide
  modified_base (1)..(1): 2' fluoro-modified
  misc_feature (1)..(2): Phosphorothioate linkage
  modified_base (2)..(2): 2' O-methyl modified
  misc_feature (2)..(3): Phosphorothioate linkage
  modified_base (3)..(3): 2' fluoro-modified
  modified_base (4)..(4): 2' O-methyl modified
  modified_base (5)..(5): 2' fluoro-modified
  modified_base (6)..(6): 2' O-methyl modified
  modified_base (7)..(7): 2' fluoro-modified
  modified_base (8)..(8): 2' fluoro-modified
  modified_base (9)..(9): 2' fluoro-modified
  modified_base (10)..(10): 2' O-methyl modified
  modified_base (11)..(11): 2' fluoro-modified
  modified_base (12)..(12): 2' O-methyl modified
  modified_base (13)..(13): 2' fluoro-modified
  modified_base (14)..(14): 2' O-methyl modified
  modified_base (15)..(15): 2' fluoro-modified
  modified_base (16)..(16): 2' O-methyl modified
  modified_base (17)..(17): 2' fluoro-modified
  modified_base (18)..(18): 2' O-methyl modified
  modified_base (19)..(19): 2' fluoro-modified
  misc_feature (19)..(20): Phosphorothioate linkage
  modified_base (20)..(20): 2' O-methyl modified
  misc_feature (20)..(21): Phosphorothioate linkage
  modified_base (21)..(21): 2' O-methyl modified
acacgcggagcgcacccgauu

SEQ ID NO: 14039 - RNA, 21 nt, Artificial Sequence
  Description of Artificial Sequence: Synthetic oligonucleotide
  modified_base (1)..(1): 2' fluoro-modified
  misc_feature (1)..(2): Phosphorothioate linkage
  modified_base (2)..(2): 2' O-methyl modified
  misc_feature (2)..(3): Phosphorothioate linkage
  modified_base (3)..(3): 2' fluoro-modified
  modified_base (4)..(4): 2' O-methyl modified
  modified_base (5)..(5): 2' fluoro-modified
  modified_base (6)..(6): 2' O-methyl modified
  modified_base (7)..(7): 2' fluoro-modified
  modified_base (8)..(8): 2' fluoro-modified
  modified_base (9)..(9): 2' fluoro-modified
  modified_base (10)..(10): 2' O-methyl modified
  modified_base (11)..(11): 2' fluoro-modified
  modified_base (12)..(12): 2' O-methyl modified
  modified_base (13)..(13): 2' fluoro-modified
  modified_base (14)..(14): 2' O-methyl modified
  modified_base (15)..(15): 2' fluoro-modified
  modified_base (16)..(16): 2' O-methyl modified
  modified_base (17)..(17): 2' fluoro-modified
  modified_base (18)..(18): 2' O-methyl modified
  modified_base (19)..(19): 2' fluoro-modified
  misc_feature (19)..(20): Phosphorothioate linkage
  modified_base (20)..(20): 2' O-methyl modified
  misc_feature (20)..(21): Phosphorothioate linkage
  modified_base (21)..(21): 2' O-methyl modified
cacgcggagcgcacccgcauu

SEQ ID NO: 14040 - RNA, 21 nt, Artificial Sequence
  Description of Artificial Sequence: Synthetic oligonucleotide
  modified_base (1)..(1): 2' fluoro-modified
  misc_feature (1)..(2): Phosphorothioate linkage
  modified_base (2)..(2): 2' O-methyl modified
  misc_feature (2)..(3): Phosphorothioate linkage
  modified_base (3)..(3): 2' fluoro-modified
  modified_base (4)..(4): 2' O-methyl modified
  modified_base (5)..(5): 2' fluoro-modified
  modified_base (6)..(6): 2' O-methyl modified
  modified_base (7)..(7): 2' fluoro-modified
  modified_base (8)..(8): 2' fluoro-modified
  modified_base (9)..(9): 2' fluoro-modified
  modified_base (10)..(10): 2' O-methyl modified
  modified_base (11)..(11): 2' fluoro-modified
  modified_base (12)..(12): 2' O-methyl modified
  modified_base (13)..(13): 2' fluoro-modified
  modified_base (14)..(14): 2' O-methyl modified
  modified_base (15)..(15): 2' fluoro-modified
  modified_base (16)..(16): 2' O-methyl modified
  modified_base (17)..(17): 2' fluoro-modified
  modified_base (18)..(18): 2' O-methyl modified
  modified_base (19)..(19): 2' fluoro-modified
  misc_feature (19)..(20): Phosphorothioate linkage
  modified_base (20)..(20): 2' O-methyl modified
  misc_feature (20)..(21): Phosphorothioate linkage
  modified_base (21)..(21): 2' O-methyl modified
gcggagcgcacccgcaguauu

SEQ ID NO: 14041 - RNA, 21 nt, Artificial Sequence
  Description of Artificial Sequence: Synthetic oligonucleotide
  modified_base (1)..(1): 2' fluoro-modified
  misc_feature (1)..(2): Phosphorothioate linkage
  modified_base (2)..(2): 2' O-methyl modified
  misc_feature (2)..(3): Phosphorothioate linkage
  modified_base (3)..(3): 2' fluoro-modified
  modified_base (4)..(4): 2' O-methyl modified
  modified_base (5)..(5): 2' fluoro-modified
  modified_base (6)..(6): 2' O-methyl modified
  modified_base (7)..(7): 2' fluoro-modified
  modified_base (8)..(8): 2' fluoro-modified
  modified_base (9)..(9): 2' fluoro-modified
  modified_base (10)..(10): 2' O-methyl modified
  modified_base (11)..(11): 2' fluoro-modified
  modified_base (12)..(12): 2' O-methyl modified
  modified_base (13)..(13): 2' fluoro-modified
  modified_base (14)..(14): 2' O-methyl modified
  modified_base (15)..(15): 2' fluoro-modified
  modified_base (16)..(16): 2' O-methyl modified
  modified_base (17)..(17): 2' fluoro-modified
  modified_base (18)..(18): 2' O-methyl modified
  modified_base (19)..(19): 2' fluoro-modified
  misc_feature (19)..(20): Phosphorothioate linkage
  modified_base (20)..(20): 2' O-methyl modified
  misc_feature (20)..(21): Phosphorothioate linkage
  modified_base (21)..(21): 2' O-methyl modified
gcgcacccgcagucagcuauu

SEQ ID NO: 14042 - RNA, 21 nt, Artificial Sequence
  Description of Artificial Sequence: Synthetic oligonucleotide
  modified_base (1)..(1): 2' fluoro-modified
  misc_feature (1)..(2): Phosphorothioate linkage
  modified_base (2)..(2): 2' O-methyl modified
  misc_feature (2)..(3): Phosphorothioate linkage
  modified_base (3)..(3): 2' fluoro-modified
  modified_base (4)..(4): 2' O-methyl modified
  modified_base (5)..(5): 2' fluoro-modified
  modified_base (6)..(6): 2' O-methyl modified
  modified_base (7)..(7): 2' fluoro-modified
  modified_base (8)..(8): 2' fluoro-modified
  modified_base (9)..(9): 2' fluoro-modified
  modified_base (10)..(10): 2' O-methyl modified
  modified_base (11)..(11): 2' fluoro-modified
  modified_base (12)..(12): 2' O-methyl modified
  modified_base (13)..(13): 2' fluoro-modified
  modified_base (14)..(14): 2' O-methyl modified
  modified_base (15)..(15): 2' fluoro-modified
  modified_base (16)..(16): 2' O-methyl modified
  modified_base (17)..(17): 2' fluoro-modified
  modified_base (18)..(18): 2' O-methyl modified
  modified_base (19)..(19): 2' fluoro-modified
  misc_feature (19)..(20): Phosphorothioate linkage
  modified_base (20)..(20): 2' O-methyl modified
  misc_feature (20)..(21): Phosphorothioate linkage
  modified_base (21)..(21): 2' O-methyl modified
gcacccgcagucagcugaauu

SEQ ID NO: 14043 - RNA, 21 nt, Artificial Sequence
  Description of Artificial Sequence: Synthetic oligonucleotide
  modified_base (1)..(1): 2' fluoro-modified
  misc_feature (1)..(2): Phosphorothioate linkage
  modified_base (2)..(2): 2' O-methyl modified
  misc_feature (2)..(3): Phosphorothioate linkage
  modified_base (3)..(3): 2' fluoro-modified
  modified_base (4)..(4): 2' O-methyl modified
  modified_base (5)..(5): 2' fluoro-modified
  modified_base (6)..(6): 2' O-methyl modified
  modified_base (7)..(7): 2' fluoro-modified
  modified_base (8)..(8): 2' fluoro-modified
  modified_base (9)..(9): 2' fluoro-modified
  modified_base (10)..(10): 2' O-methyl modified
  modified_base (11)..(11): 2' fluoro-modified
  modified_base (12)..(12): 2' O-methyl modified
  modified_base (13)..(13): 2' fluoro-modified
  modified_base (14)..(14): 2' O-methyl modified
  modified_base (15)..(15): 2' fluoro-modified
  modified_base (16)..(16): 2' O-methyl modified
  modified_base (17)..(17): 2' fluoro-modified
  modified_base (18)..(18): 2' O-methyl modified
  modified_base (19)..(19): 2' fluoro-modified
  misc_feature (19)..(20): Phosphorothioate linkage
  modified_base (20)..(20): 2' O-methyl modified
  misc_feature (20)..(21): Phosphorothioate linkage
  modified_base (21)..(21): 2' O-methyl modified
ggaaccgagggguccaccauu

SEQ ID NO: 14044 - RNA, 21 nt, Artificial Sequence
  Description of Artificial Sequence: Synthetic oligonucleotide
  modified_base (1)..(1): 2' fluoro-modified
  misc_feature (1)..(2): Phosphorothioate linkage
  modified_base (2)..(2): 2' O-methyl modified
  misc_feature (2)..(3): Phosphorothioate linkage
  modified_base (3)..(3): 2' fluoro-modified
  modified_base (4)..(4): 2' O-methyl modified
  modified_base (5)..(5): 2' fluoro-modified
  modified_base (6)..(6): 2' O-methyl modified
  modified_base (7)..(7): 2' fluoro-modified
  modified_base (8)..(8): 2' fluoro-modified
  modified_base (9)..(9): 2' fluoro-modified
  modified_base (10)..(10): 2' O-methyl modified
  modified_base (11)..(11): 2' fluoro-modified
  modified_base (12)..(12): 2' O-methyl modified
  modified_base (13)..(13): 2' fluoro-modified
  modified_base (14)..(14): 2' O-methyl modified
  modified_base (15)..(15): 2' fluoro-modified
  modified_base (16)..(16): 2' O-methyl modified
  modified_base (17)..(17): 2' fluoro-modified
  modified_base (18)..(18): 2' O-methyl modified
  modified_base (19)..(19): 2' fluoro-modified
  misc_feature (19)..(20): Phosphorothioate linkage
  modified_base (20)..(20): 2' O-methyl modified
  misc_feature (20)..(21): Phosphorothioate linkage
  modified_base (21)..(21): 2' O-methyl modified
gaaccgagggguccaccgauu

SEQ ID NO: 14045 - RNA, 21 nt, Artificial Sequence
  Description of Artificial Sequence: Synthetic oligonucleotide
  modified_base (1)..(1): 2' fluoro-modified
  misc_feature (1)..(2): Phosphorothioate linkage
  modified_base (2)..(2): 2' O-methyl modified
  misc_feature (2)..(3): Phosphorothioate linkage
  modified_base (3)..(3): 2' fluoro-modified
  modified_base (4)..(4): 2' O-methyl modified
  modified_base (5)..(5): 2' fluoro-modified
  modified_base (6)..(6): 2' O-methyl modified
  modified_base (7)..(7): 2' fluoro-modified
  modified_base (8)..(8): 2' fluoro-modified
  modified_base (9)..(9): 2' fluoro-modified
  modified_base (10)..(10): 2' O-methyl modified
  modified_base (11)..(11): 2' fluoro-modified
  modified_base (12)..(12): 2' O-methyl modified
  modified_base (13)..(13): 2' fluoro-modified
  modified_base (14)..(14): 2' O-methyl modified
  modified_base (15)..(15): 2' fluoro-modified
  modified_base (16)..(16): 2' O-methyl modified
  modified_base (17)..(17): 2' fluoro-modified
  modified_base (18)..(18): 2' O-methyl modified
  modified_base (19)..(19): 2' fluoro-modified
  misc_feature (19)..(20): Phosphorothioate linkage
  modified_base (20)..(20): 2' O-methyl modified
  misc_feature (20)..(21): Phosphorothioate linkage
  modified_base (21)..(21): 2' O-methyl modified
accucccguuagccccugauu

SEQ ID NO: 14046 - RNA, 21 nt, Artificial Sequence
  Description of Artificial Sequence: Synthetic oligonucleotide
  modified_base (1)..(1): 2' fluoro-modified
  misc_feature (1)..(2): Phosphorothioate linkage
  modified_base (2)..(2): 2' O-methyl modified
  misc_feature (2)..(3): Phosphorothioate linkage
  modified_base (3)..(3): 2' fluoro-modified
  modified_base (4)..(4): 2' O-methyl modified
  modified_base (5)..(5): 2' fluoro-modified
  modified_base (6)..(6): 2' O-methyl modified
  modified_base (7)..(7): 2' fluoro-modified
  modified_base (8)..(8): 2' fluoro-modified
  modified_base (9)..(9): 2' fluoro-modified
  modified_base (10)..(10): 2' O-methyl modified
  modified_base (11)..(11): 2' fluoro-modified
  modified_base (12)..(12): 2' O-methyl modified
  modified_base (13)..(13): 2' fluoro-modified
  modified_base (14)..(14): 2' O-methyl modified
  modified_base (15)..(15): 2' fluoro-modified
  modified_base (16)..(16): 2' O-methyl modified
  modified_base (17)..(17): 2' fluoro-modified
  modified_base (18)..(18): 2' O-methyl modified
  modified_base (19)..(19): 2' fluoro-modified
  misc_feature (19)..(20): Phosphorothioate linkage
  modified_base (20)..(20): 2' O-methyl modified
  misc_feature (20)..(21): Phosphorothioate linkage
  modified_base (21)..(21): 2' O-methyl modified
ccucccguuagccccugaauu

SEQ ID NO: 14047 - RNA, 21 nt, Artificial Sequence
  Description of Artificial Sequence: Synthetic oligonucleotide
  modified_base (1)..(1): 2' fluoro-modified
  misc_feature (1)..(2): Phosphorothioate linkage
  modified_base (2)..(2): 2' O-methyl modified
  misc_feature (2)..(3): Phosphorothioate linkage
  modified_base (3)..(3): 2' fluoro-modified
  modified_base (4)..(4): 2' O-methyl modified
  modified_base (5)..(5): 2' fluoro-modified
  modified_base (6)..(6): 2' O-methyl modified
  modified_base (7)..(7): 2' fluoro-modified
  modified_base (8)..(8): 2' fluoro-modified
  modified_base (9)..(9): 2' fluoro-modified
  modified_base (10)..(10): 2' O-methyl modified
  modified_base (11)..(11): 2' fluoro-modified
  modified_base (12)..(12): 2' O-methyl modified
  modified_base (13)..(13): 2' fluoro-modified
  modified_base (14)..(14): 2' O-methyl modified
  modified_base (15)..(15): 2' fluoro-modified
  modified_base (16)..(16): 2' O-methyl modified
  modified_base (17)..(17): 2' fluoro-modified
  modified_base (18)..(18): 2' O-methyl modified
  modified_base (19)..(19): 2' fluoro-modified
  misc_feature (19)..(20): Phosphorothioate linkage
  modified_base (20)..(20): 2' O-methyl modified
  misc_feature (20)..(21): Phosphorothioate linkage
  modified_base (21)..(21): 2' O-methyl modified
ccguuagccccugagagcauu

SEQ ID NO: 14048 - RNA, 21 nt, Artificial Sequence
  Description of Artificial Sequence: Synthetic oligonucleotide
  modified_base (1)..(1): 2' fluoro-modified
  misc_feature (1)..(2): Phosphorothioate linkage
  modified_base (2)..(2): 2' O-methyl modified
  misc_feature (2)..(3): Phosphorothioate linkage
  modified_base (3)..(3): 2' fluoro-modified
  modified_base (4)..(4): 2' O-methyl modified
  modified_base (5)..(5): 2' fluoro-modified
  modified_base (6)..(6): 2' O-methyl modified
  modified_base (7)..(7): 2' fluoro-modified
  modified_base (8)..(8): 2' fluoro-modified
  modified_base (9)..(9): 2' fluoro-modified
  modified_base (10)..(10): 2' O-methyl modified
  modified_base (11)..(11): 2' fluoro-modified
  modified_base (12)..(12): 2' O-methyl modified
  modified_base (13)..(13): 2' fluoro-modified
  modified_base (14)..(14): 2' O-methyl modified
  modified_base (15)..(15): 2' fluoro-modified
  modified_base (16)..(16): 2' O-methyl modified
  modified_base (17)..(17): 2' fluoro-modified
  modified_base (18)..(18): 2' O-methyl modified
  modified_base (19)..(19): 2' fluoro-modified
  misc_feature (19)..(20): Phosphorothioate linkage
  modified_base (20)..(20): 2' O-methyl modified
  misc_feature (20)..(21): Phosphorothioate linkage
  modified_base (21)..(21): 2' O-methyl modified
ugcagacacaacucaaggauu

SEQ ID NO: 14049 - RNA, 21 nt, Artificial Sequence
  Description of Artificial Sequence: Synthetic oligonucleotide
  modified_base (1)..(1): 2' fluoro-modified
  misc_feature (1)..(2): Phosphorothioate linkage
  modified_base (2)..(2): 2' O-methyl modified
  misc_feature (2)..(3): Phosphorothioate linkage
  modified_base (3)..(3): 2' fluoro-modified
  modified_base (4)..(4): 2' O-methyl modified
  modified_base (5)..(5): 2' fluoro-modified
  modified_base (6)..(6): 2' O-methyl modified
  modified_base (7)..(7): 2' fluoro-modified
  modified_base (8)..(8): 2' fluoro-modified
  modified_base (9)..(9): 2' fluoro-modified
  modified_base (10)..(10): 2' O-methyl modified
  modified_base (11)..(11): 2' fluoro-modified
  modified_base (12)..(12): 2' O-methyl modified
  modified_base (13)..(13): 2' fluoro-modified
  modified_base (14)..(14): 2' O-methyl modified
  modified_base (15)..(15): 2' fluoro-modified
  modified_base (16)..(16): 2' O-methyl modified
  modified_base (17)..(17): 2' fluoro-modified
  modified_base (18)..(18): 2' O-methyl modified
  modified_base (19)..(19): 2' fluoro-modified
  misc_feature (19)..(20): Phosphorothioate linkage
  modified_base (20)..(20): 2' O-methyl modified
  misc_feature (20)..(21): Phosphorothioate linkage
  modified_base (21)..(21): 2' O-methyl modified
agacacaacucaaggcucauu

SEQ ID NO: 14050 - RNA, 21 nt, Artificial Sequence
  Description of Artificial Sequence: Synthetic oligonucleotide
  modified_base (1)..(1): 2' fluoro-modified
  misc_feature (1)..(2): Phosphorothioate linkage
  modified_base (2)..(2): 2' O-methyl modified
  misc_feature (2)..(3): Phosphorothioate linkage
  modified_base (3)..(3): 2' fluoro-modified
  modified_base (4)..(4): 2' O-methyl modified
  modified_base (5)..(5): 2' fluoro-modified
  modified_base (6)..(6): 2' O-methyl modified
  modified_base (7)..(7): 2' fluoro-modified
  modified_base (8)..(8): 2' fluoro-modified
  modified_base (9)..(9): 2' fluoro-modified
  modified_base (10)..(10): 2' O-methyl modified
  modified_base (11)..(11): 2' fluoro-modified
  modified_base (12)..(12): 2' O-methyl modified
  modified_base (13)..(13): 2' fluoro-modified
  modified_base (14)..(14): 2' O-methyl modified
  modified_base (15)..(15): 2' fluoro-modified
  modified_base (16)..(16): 2' O-methyl modified
  modified_base (17)..(17): 2' fluoro-modified
  modified_base (18)..(18): 2' O-methyl modified
  modified_base (19)..(19): 2' fluoro-modified
  misc_feature (19)..(20): Phosphorothioate linkage
  modified_base (20)..(20): 2' O-methyl modified
  misc_feature (20)..(21): Phosphorothioate linkage
  modified_base (21)..(21): 2' O-methyl modified
caggauccagcaacucuuauu

SEQ ID NO: 14051 - RNA, 21 nt, Artificial Sequence
  Description of Artificial Sequence: Synthetic oligonucleotide
  modified_base (1)..(1): 2' fluoro-modified
  misc_feature (1)..(2): Phosphorothioate linkage
  modified_base (2)..(2): 2' O-methyl modified
  misc_feature (2)..(3): Phosphorothioate linkage
  modified_base (3)..(3): 2' fluoro-modified
  modified_base (4)..(4): 2' O-methyl modified
  modified_base (5)..(5): 2' fluoro-modified
  modified_base (6)..(6): 2' O-methyl modified
  modified_base (7)..(7): 2' fluoro-modified
  modified_base (8)..(8): 2' fluoro-modified
  modified_base (9)..(9): 2' fluoro-modified
  modified_base (10)..(10): 2' O-methyl modified
  modified_base (11)..(11): 2' fluoro-modified
  modified_base (12)..(12): 2' O-methyl modified
  modified_base (13)..(13): 2' fluoro-modified
  modified_base (14)..(14): 2' O-methyl modified
  modified_base (15)..(15): 2' fluoro-modified
  modified_base (16)..(16): 2' O-methyl modified
  modified_base (17)..(17): 2' fluoro-modified
  modified_base (18)..(18): 2' O-methyl modified
  modified_base (19)..(19): 2' fluoro-modified
  misc_feature (19)..(20): Phosphorothioate linkage
  modified_base (20)..(20): 2' O-methyl modified
  misc_feature (20)..(21): Phosphorothioate linkage
  modified_base (21)..(21): 2' O-methyl modified
agcaacucuuccacaaggauu

SEQ ID NO: 14052 - RNA, 21 nt, Artificial Sequence
  Description of Artificial Sequence: Synthetic oligonucleotide
  modified_base (1)..(1): 2' fluoro-modified
  misc_feature (1)..(2): Phosphorothioate linkage
  modified_base (2)..(2): 2' O-methyl modified
  misc_feature (2)..(3): Phosphorothioate linkage
  modified_base (3)..(3): 2' fluoro-modified
  modified_base (4)..(4): 2' O-methyl modified
  modified_base (5)..(5): 2' fluoro-modified
  modified_base (6)..(6): 2' O-methyl modified
  modified_base (7)..(7): 2' fluoro-modified
  modified_base (8)..(8): 2' fluoro-modified
  modified_base (9)..(9): 2' fluoro-modified
  modified_base (10)..(10): 2' O-methyl modified
  modified_base (11)..(11): 2' fluoro-modified
  modified_base (12)..(12): 2' O-methyl modified
  modified_base (13)..(13): 2' fluoro-modified
  modified_base (14)..(14): 2' O-methyl modified
  modified_base (15)..(15): 2' fluoro-modified
  modified_base (16)..(16): 2' O-methyl modified
  modified_base (17)..(17): 2' fluoro-modified
  modified_base (18)..(18): 2' O-methyl modified
  modified_base (19)..(19): 2' fluoro-modified
  misc_feature (19)..(20): Phosphorothioate linkage
  modified_base (20)..(20): 2' O-methyl modified
  misc_feature (20)..(21): Phosphorothioate linkage
  modified_base (21)..(21): 2' O-methyl modified
caacucuuccacaaggugauu

SEQ ID NO: 14053 - RNA, 21 nt, Artificial Sequence
  Description of Artificial Sequence: Synthetic oligonucleotide
  modified_base (1)..(1): 2' fluoro-modified
  misc_feature (1)..(2): Phosphorothioate linkage
  modified_base (2)..(2): 2' O-methyl modified
  misc_feature (2)..(3): Phosphorothioate linkage
  modified_base (3)..(3): 2' fluoro-modified
  modified_base (4)..(4): 2' O-methyl modified
  modified_base (5)..(5): 2' fluoro-modified
  modified_base (6)..(6): 2' O-methyl modified
  modified_base (7)..(7): 2' fluoro-modified
  modified_base (8)..(8): 2' fluoro-modified
  modified_base (9)..(9): 2' fluoro-modified
  modified_base (10)..(10): 2' O-methyl modified
  modified_base (11)..(11): 2' fluoro-modified
  modified_base (12)..(12): 2' O-methyl modified
  modified_base (13)..(13): 2' fluoro-modified
  modified_base (14)..(14): 2' O-methyl modified
  modified_base (15)..(15): 2' fluoro-modified
  modified_base (16)..(16): 2' O-methyl modified
  modified_base (17)..(17): 2' fluoro-modified
  modified_base (18)..(18): 2' O-methyl modified
  modified_base (19)..(19): 2' fluoro-modified
  misc_feature (19)..(20): Phosphorothioate linkage
  modified_base (20)..(20): 2' O-methyl modified
  misc_feature (20)..(21): Phosphorothioate linkage
  modified_base (21)..(21): 2' O-methyl modified
aacucuuccacaagguggauu

SEQ ID NO: 14054 - RNA, 21 nt, Artificial Sequence
  Description of Artificial Sequence: Synthetic oligonucleotide
  modified_base (1)..(1): 2' fluoro-modified
  misc_feature (1)..(2): Phosphorothioate linkage
  modified_base (2)..(2): 2' O-methyl modified
  misc_feature (2)..(3): Phosphorothioate linkage
  modified_base (3)..(3): 2' fluoro-modified
  modified_base (4)..(4): 2' O-methyl modified
  modified_base (5)..(5): 2' fluoro-modified
  modified_base (6)..(6): 2' O-methyl modified
  modified_base (7)..(7): 2' fluoro-modified
  modified_base (8)..(8): 2' fluoro-modified
  modified_base (9)..(9): 2' fluoro-modified
  modified_base (10)..(10): 2' O-methyl modified
  modified_base (11)..(11): 2' fluoro-modified
  modified_base (12)..(12): 2' O-methyl modified
  modified_base (13)..(13): 2' fluoro-modified
  modified_base (14)..(14): 2' O-methyl modified
  modified_base (15)..(15): 2' fluoro-modified
  modified_base (16)..(16): 2' O-methyl modified
  modified_base (17)..(17): 2' fluoro-modified
  modified_base (18)..(18): 2' O-methyl modified
  modified_base (19)..(19): 2' fluoro-modified
  misc_feature (19)..(20): Phosphorothioate linkage
  modified_base (20)..(20): 2' O-methyl modified
  misc_feature (20)..(21): Phosphorothioate linkage
  modified_base (21)..(21): 2' O-methyl modified
agcaccugcgaauucagcauu

SEQ ID NO: 14055 - RNA, 21 nt, Artificial Sequence
  Description of Artificial Sequence: Synthetic oligonucleotide
  modified_base (1)..(1): 2' fluoro-modified
  misc_feature (1)..(2): Phosphorothioate linkage
  modified_base (2)..(2): 2' O-methyl modified
  misc_feature (2)..(3): Phosphorothioate linkage
  modified_base (3)..(3): 2' fluoro-modified
  modified_base (4)..(4): 2' O-methyl modified
  modified_base (5)..(5): 2' fluoro-modified
  modified_base (6)..(6): 2' O-methyl modified
  modified_base (7)..(7): 2' fluoro-modified
  modified_base (8)..(8): 2' fluoro-modified
  modified_base (9)..(9): 2' fluoro-modified
  modified_base (10)..(10): 2' O-methyl modified
  modified_base (11)..(11): 2' fluoro-modified
  modified_base (12)..(12): 2' O-methyl modified
  modified_base (13)..(13): 2' fluoro-modified
  modified_base (14)..(14): 2' O-methyl modified
  modified_base (15)..(15): 2' fluoro-modified
  modified_base (16)..(16): 2' O-methyl modified
  modified_base (17)..(17): 2' fluoro-modified
  modified_base (18)..(18): 2' O-methyl modified
  modified_base (19)..(19): 2' fluoro-modified
  misc_feature (19)..(20): Phosphorothioate linkage
  modified_base (20)..(20): 2' O-methyl modified
  misc_feature (20)..(21): Phosphorothioate linkage
  modified_base (21)..(21): 2' O-methyl modified
ccuagaccaugagguggcauu

SEQ ID NO: 14056 - RNA, 21 nt, Artificial Sequence
  Description of Artificial Sequence: Synthetic oligonucleotide
  modified_base (1)..(1): 2' fluoro-modified
  misc_feature (1)..(2): Phosphorothioate linkage
  modified_base (2)..(2): 2' O-methyl modified
  misc_feature (2)..(3): Phosphorothioate linkage
  modified_base (3)..(3): 2' fluoro-modified
  modified_base (4)..(4): 2' O-methyl modified
  modified_base (5)..(5): 2' fluoro-modified
  modified_base (6)..(6): 2' O-methyl modified
  modified_base (7)..(7): 2' fluoro-modified
  modified_base (8)..(8): 2' fluoro-modified
  modified_base (9)..(9): 2' fluoro-modified
  modified_base (10)..(10): 2' O-methyl modified
  modified_base (11)..(11): 2' fluoro-modified
  modified_base (12)..(12): 2' O-methyl modified
  modified_base (13)..(13): 2' fluoro-modified
  modified_base (14)..(14): 2' O-methyl modified
  modified_base (15)..(15): 2' fluoro-modified
  modified_base (16)..(16): 2' O-methyl modified
  modified_base (17)..(17): 2' fluoro-modified
  modified_base (18)..(18): 2' O-methyl modified
  modified_base (19)..(19): 2' fluoro-modified
  misc_feature (19)..(20): Phosphorothioate linkage
  modified_base (20)..(20): 2' O-methyl modified
  misc_feature (20)..(21): Phosphorothioate linkage
  modified_base (21)..(21): 2' O-methyl modified
ggccaagccugcccgaagauu

SEQ ID NO: 14057 - RNA, 21 nt, Artificial Sequence
  Description of Artificial Sequence: Synthetic oligonucleotide
  modified_base (1)..(1): 2' fluoro-modified
  misc_feature (1)..(2): Phosphorothioate linkage
  modified_base (2)..(2): 2' O-methyl modified
  misc_feature (2)..(3): Phosphorothioate linkage
  modified_base (3)..(3): 2' fluoro-modified
  modified_base (4)..(4): 2' O-methyl modified
  modified_base (5)..(5): 2' fluoro-modified
  modified_base (6)..(6): 2' O-methyl modified
  modified_base (7)..(7): 2' fluoro-modified
  modified_base (8)..(8): 2' fluoro-modified
  modified_base (9)..(9): 2' fluoro-modified
  modified_base (10)..(10): 2' O-methyl modified
  modified_base (11)..(11): 2' fluoro-modified
  modified_base (12)..(12): 2' O-methyl modified
  modified_base (13)..(13): 2' fluoro-modified
  modified_base (14)..(14): 2' O-methyl modified
  modified_base (15)..(15): 2' fluoro-modified
  modified_base (16)..(16): 2' O-methyl modified
  modified_base (17)..(17): 2' fluoro-modified
  modified_base (18)..(18): 2' O-methyl modified
  modified_base (19)..(19): 2' fluoro-modified
  misc_feature (19)..(20): Phosphorothioate linkage
  modified_base (20)..(20): 2' O-methyl modified
  misc_feature (20)..(21): Phosphorothioate linkage
  modified_base (21)..(21): 2' O-methyl modified
ccaagccugcccgaagaaauu

SEQ ID NO: 14058 - RNA, 21 nt, Artificial Sequence
  Description of Artificial Sequence: Synthetic oligonucleotide
  modified_base (1)..(1): 2' fluoro-modified
  misc_feature (1)..(2): Phosphorothioate linkage
  modified_base (2)..(2): 2' O-methyl modified
  misc_feature (2)..(3): Phosphorothioate linkage
  modified_base (3)..(3): 2' fluoro-modified
  modified_base (4)..(4): 2' O-methyl modified
  modified_base (5)..(5): 2' fluoro-modified
  modified_base (6)..(6): 2' O-methyl modified
  modified_base (7)..(7): 2' fluoro-modified
  modified_base (8)..(8): 2' fluoro-modified
  modified_base (9)..(9): 2' fluoro-modified
  modified_base (10)..(10): 2' O-methyl modified
  modified_base (11)..(11): 2' fluoro-modified
  modified_base (12)..(12): 2' O-methyl modified
  modified_base (13)..(13): 2' fluoro-modified
  modified_base (14)..(14): 2' O-methyl modified
  modified_base (15)..(15): 2' fluoro-modified
  modified_base (16)..(16): 2' O-methyl modified
  modified_base (17)..(17): 2' fluoro-modified
  modified_base (18)..(18): 2' O-methyl modified
  modified_base (19)..(19): 2' fluoro-modified
  misc_feature (19)..(20): Phosphorothioate linkage
  modified_base (20)..(20): 2' O-methyl modified
  misc_feature (20)..(21): Phosphorothioate linkage
  modified_base (21)..(21): 2' O-methyl modified
agccugcccgaagaaagaauu

SEQ ID NO: 14059 - RNA, 21 nt, Artificial Sequence
  Description of Artificial Sequence: Synthetic oligonucleotide
  modified_base (1)..(1): 2' fluoro-modified
  misc_feature (1)..(2): Phosphorothioate linkage
  modified_base (2)..(2): 2' O-methyl modified
  misc_feature (2)..(3): Phosphorothioate linkage
  modified_base (3)..(3): 2' fluoro-modified
  modified_base (4)..(4): 2' O-methyl modified
  modified_base (5)..(5): 2' fluoro-modified
  modified_base (6)..(6): 2' O-methyl modified
  modified_base (7)..(7): 2' fluoro-modified
  modified_base (8)..(8): 2' fluoro-modified
  modified_base (9)..(9): 2' fluoro-modified
  modified_base (10)..(10): 2' O-methyl modified
  modified_base (11)..(11): 2' fluoro-modified
  modified_base (12)..(12): 2' O-methyl modified
  modified_base (13)..(13): 2' fluoro-modified
  modified_base (14)..(14): 2' O-methyl modified
  modified_base (15)..(15): 2' fluoro-modified
  modified_base (16)..(16): 2' O-methyl modified
  modified_base (17)..(17): 2' fluoro-modified
  modified_base (18)..(18): 2' O-methyl modified
  modified_base (19)..(19): 2' fluoro-modified
  misc_feature (19)..(20): Phosphorothioate linkage
  modified_base (20)..(20): 2' O-methyl modified
  misc_feature (20)..(21): Phosphorothioate linkage
  modified_base (21)..(21): 2' O-methyl modified
uggaggcuggacaguaauauu

SEQ ID NO: 14060 - RNA, 21 nt, Artificial Sequence
  Description of Artificial Sequence: Synthetic oligonucleotide
  modified_base (1)..(1): 2' fluoro-modified
  misc_feature (1)..(2): Phosphorothioate linkage
  modified_base (2)..(2): 2' O-methyl modified
  misc_feature (2)..(3): Phosphorothioate linkage
  modified_base (3)..(3): 2' fluoro-modified
  modified_base (4)..(4): 2' O-methyl modified
  modified_base (5)..(5): 2' fluoro-modified
  modified_base (6)..(6): 2' O-methyl modified
  modified_base (7)..(7): 2' fluoro-modified
  modified_base (8)..(8): 2' fluoro-modified
  modified_base (9)..(9): 2' fluoro-modified
  modified_base (10)..(10): 2' O-methyl modified
  modified_base (11)..(11): 2' fluoro-modified
  modified_base (12)..(12): 2' O-methyl modified
  modified_base (13)..(13): 2' fluoro-modified
  modified_base (14)..(14): 2' O-methyl modified
  modified_base (15)..(15): 2' fluoro-modified
  modified_base (16)..(16): 2' O-methyl modified
  modified_base (17)..(17): 2' fluoro-modified
  modified_base (18)..(18): 2' O-methyl modified
  modified_base (19)..(19): 2' fluoro-modified
  misc_feature (19)..(20): Phosphorothioate linkage
  modified_base (20)..(20): 2' O-methyl modified
  misc_feature (20)..(21): Phosphorothioate linkage
  modified_base (21)..(21): 2' O-methyl modified
ggcuggacaguaauucagauu

SEQ ID NO: 14061 - RNA, 21 nt, Artificial Sequence
  Description of Artificial Sequence: Synthetic oligonucleotide
  modified_base (1)..(1): 2' fluoro-modified
  misc_feature (1)..(2): Phosphorothioate linkage
  modified_base (2)..(2): 2' O-methyl modified
  misc_feature (2)..(3): Phosphorothioate linkage
  modified_base (3)..(3): 2' fluoro-modified
  modified_base (4)..(4): 2' O-methyl modified
  modified_base (5)..(5): 2' fluoro-modified
  modified_base (6)..(6): 2' O-methyl modified
  modified_base (7)..(7): 2' fluoro-modified
  modified_base (8)..(8): 2' fluoro-modified
  modified_base (9)..(9): 2' fluoro-modified
  modified_base (10)..(10): 2' O-methyl modified
  modified_base (11)..(11): 2' fluoro-modified
  modified_base (12)..(12): 2' O-methyl modified
  modified_base (13)..(13): 2' fluoro-modified
  modified_base (14)..(14): 2' O-methyl modified
  modified_base (15)..(15): 2' fluoro-modified
  modified_base (16)..(16): 2' O-methyl modified
  modified_base (17)..(17): 2' fluoro-modified
  modified_base (18)..(18): 2' O-methyl modified
  modified_base (19)..(19): 2' fluoro-modified
  misc_feature (19)..(20): Phosphorothioate linkage
  modified_base (20)..(20): 2' O-methyl modified
  misc_feature (20)..(21): Phosphorothioate linkage
  modified_base (21)..(21): 2' O-methyl modified
caguaauucagaggcgccauu

SEQ ID NO: 14062 - RNA, 21 nt, Artificial Sequence
  Description of Artificial Sequence: Synthetic oligonucleotide
  modified_base (1)..(1): 2' fluoro-modified
  misc_feature (1)..(2): Phosphorothioate linkage
  modified_base (2)..(2): 2' O-methyl modified
  misc_feature (2)..(3): Phosphorothioate linkage
  modified_base (3)..(3): 2' fluoro-modified
  modified_base (4)..(4): 2' O-methyl modified
  modified_base (5)..(5): 2' fluoro-modified
  modified_base (6)..(6): 2' O-methyl modified
  modified_base (7)..(7): 2' fluoro-modified
  modified_base (8)..(8): 2' fluoro-modified
  modified_base (9)..(9): 2' fluoro-modified
  modified_base (10)..(10): 2' O-methyl modified
  modified_base (11)..(11): 2' fluoro-modified
  modified_base (12)..(12): 2' O-methyl modified
  modified_base (13)..(13): 2' fluoro-modified
  modified_base (14)..(14): 2' O-methyl modified
  modified_base (15)..(15): 2' fluoro-modified
  modified_base (16)..(16): 2' O-methyl modified
  modified_base (17)..(17): 2' fluoro-modified
  modified_base (18)..(18): 2' O-methyl modified
  modified_base (19)..(19): 2' fluoro-modified
  misc_feature (19)..(20): Phosphorothioate linkage
  modified_base (20)..(20): 2' O-methyl modified
  misc_feature (20)..(21): Phosphorothioate linkage
  modified_base (21)..(21): 2' O-methyl modified
aguaauucagaggcgccaauu

SEQ ID NO: 14063 - RNA, 21 nt, Artificial Sequence
  Description of Artificial Sequence: Synthetic oligonucleotide
  modified_base (1)..(1): 2' fluoro-modified
  misc_feature (1)..(2): Phosphorothioate linkage
  modified_base (2)..(2): 2' O-methyl modified
  misc_feature (2)..(3): Phosphorothioate linkage
  modified_base (3)..(3): 2' fluoro-modified
  modified_base (4)..(4): 2' O-methyl modified
  modified_base (5)..(5): 2' fluoro-modified
  modified_base (6)..(6): 2' O-methyl modified
  modified_base (7)..(7): 2' fluoro-modified
  modified_base (8)..(8): 2' fluoro-modified
  modified_base (9)..(9): 2' fluoro-modified
  modified_base (10)..(10): 2' O-methyl modified
  modified_base (11)..(11): 2' fluoro-modified
  modified_base (12)..(12): 2' O-methyl modified
  modified_base (13)..(13): 2' fluoro-modified
  modified_base (14)..(14): 2' O-methyl modified
  modified_base (15)..(15): 2' fluoro-modified
  modified_base (16)..(16): 2' O-methyl modified
  modified_base (17)..(17): 2' fluoro-modified
  modified_base (18)..(18): 2' O-methyl modified
  modified_base (19)..(19): 2' fluoro-modified
  misc_feature (19)..(20): Phosphorothioate linkage
  modified_base (20)..(20): 2' O-methyl modified
  misc_feature (20)..(21): Phosphorothioate linkage
  modified_base (21)..(21): 2' O-methyl modified
guaauucagaggcgccacauu

SEQ ID NO: 14064 - RNA, 21 nt, Artificial Sequence
  Description of Artificial Sequence: Synthetic oligonucleotide
  modified_base (1)..(1): 2' fluoro-modified
  misc_feature (1)..(2): Phosphorothioate linkage
  modified_base (2)..(2): 2' O-methyl modified
  misc_feature (2)..(3): Phosphorothioate linkage
  modified_base (3)..(3): 2' fluoro-modified
  modified_base (4)..(4): 2' O-methyl modified
  modified_base (5)..(5): 2' fluoro-modified
  modified_base (6)..(6): 2' O-methyl modified
  modified_base (7)..(7): 2' fluoro-modified
  modified_base (8)..(8): 2' fluoro-modified
  modified_base (9)..(9): 2' fluoro-modified
  modified_base (10)..(10): 2' O-methyl modified
  modified_base (11)..(11): 2' fluoro-modified
  modified_base (12)..(12): 2' O-methyl modified
  modified_base (13)..(13): 2' fluoro-modified
  modified_base (14)..(14): 2' O-methyl modified
  modified_base (15)..(15): 2' fluoro-modified
  modified_base (16)..(16): 2' O-methyl modified
  modified_base (17)..(17): 2' fluoro-modified
  modified_base (18)..(18): 2' O-methyl modified
  modified_base (19)..(19): 2' fluoro-modified
  misc_feature (19)..(20): Phosphorothioate linkage
  modified_base (20)..(20): 2' O-methyl modified
  misc_feature (20)..(21): Phosphorothioate linkage
  modified_base (21)..(21): 2' O-methyl modified
uaauucagaggcgccacgauu

SEQ ID NO: 14065 - RNA, 21 nt, Artificial Sequence
  Description of Artificial Sequence: Synthetic oligonucleotide
  modified_base (1)..(1): 2' fluoro-modified
  misc_feature (1)..(2): Phosphorothioate linkage
  modified_base (2)..(2): 2' O-methyl modified
  misc_feature (2)..(3): Phosphorothioate linkage
  modified_base (3)..(3): 2' fluoro-modified
  modified_base (4)..(4): 2' O-methyl modified
  modified_base (5)..(5): 2' fluoro-modified
  modified_base (6)..(6): 2' O-methyl modified
  modified_base (7)..(7): 2' fluoro-modified
  modified_base (8)..(8): 2' fluoro-modified
  modified_base (9)..(9): 2' fluoro-modified
  modified_base (10)..(10): 2' O-methyl modified
  modified_base (11)..(11): 2' fluoro-modified
  modified_base (12)..(12): 2' O-methyl modified
  modified_base (13)..(13): 2' fluoro-modified
  modified_base (14)..(14): 2' O-methyl modified
  modified_base (15)..(15): 2' fluoro-modified
  modified_base (16)..(16): 2' O-methyl modified
  modified_base (17)..(17): 2' fluoro-modified
  modified_base (18)..(18): 2' O-methyl modified
  modified_base (19)..(19): 2' fluoro-modified
  misc_feature (19)..(20): Phosphorothioate linkage
  modified_base (20)..(20): 2' O-methyl modified
  misc_feature (20)..(21): Phosphorothioate linkage
  modified_base (21)..(21): 2' O-methyl modified
agaggcgccacgauggcuauu

SEQ ID NO: 14066 - RNA, 21 nt, Artificial Sequence
  Description of Artificial Sequence: Synthetic oligonucleotide
  modified_base (1)..(1): 2' fluoro-modified
  misc_feature (1)..(2): Phosphorothioate linkage
  modified_base (2)..(2): 2' O-methyl modified
  misc_feature (2)..(3): Phosphorothioate linkage
  modified_base (3)..(3): 2' fluoro-modified
  modified_base (4)..(4): 2' O-methyl modified
  modified_base (5)..(5): 2' fluoro-modified
  modified_base (6)..(6): 2' O-methyl modified
  modified_base (7)..(7): 2' fluoro-modified
  modified_base (8)..(8): 2' fluoro-modified
  modified_base (9)..(9): 2' fluoro-modified
  modified_base (10)..(10): 2' O-methyl modified
  modified_base (11)..(11): 2' fluoro-modified
  modified_base (12)..(12): 2' O-methyl modified
  modified_base (13)..(13): 2' fluoro-modified
  modified_base (14)..(14): 2' O-methyl modified
  modified_base (15)..(15): 2' fluoro-modified
  modified_base (16)..(16): 2' O-methyl modified
  modified_base (17)..(17): 2' fluoro-modified
  modified_base (18)..(18): 2' O-methyl modified
  modified_base (19)..(19): 2' fluoro-modified
  misc_feature (19)..(20): Phosphorothioate linkage
  modified_base (20)..(20): 2' O-methyl modified
  misc_feature (20)..(21): Phosphorothioate linkage
  modified_base (21)..(21): 2' O-methyl modified
uggacuucaaccggcccuauu

SEQ ID NO: 14067 - RNA, 21 nt, Artificial Sequence
  Description of Artificial Sequence: Synthetic oligonucleotide
  modified_base (1)..(1): 2' fluoro-modified
  misc_feature (1)..(2): Phosphorothioate linkage
  modified_base (2)..(2): 2' O-methyl modified
  misc_feature (2)..(3): Phosphorothioate linkage
  modified_base (3)..(3): 2' fluoro-modified
  modified_base (4)..(4): 2' O-methyl modified
  modified_base (5)..(5): 2' fluoro-modified
  modified_base (6)..(6): 2' O-methyl modified
  modified_base (7)..(7): 2' fluoro-modified
  modified_base (8)..(8): 2' fluoro-modified
  modified_base (9)..(9): 2' fluoro-modified
  modified_base (10)..(10): 2' O-methyl modified
  modified_base (11)..(11): 2' fluoro-modified
  modified_base (12)..(12): 2' O-methyl modified
  modified_base (13)..(13): 2' fluoro-modified
  modified_base (14)..(14): 2' O-methyl modified
  modified_base (15)..(15): 2' fluoro-modified
  modified_base (16)..(16): 2' O-methyl modified
  modified_base (17)..(17): 2' fluoro-modified
  modified_base (18)..(18): 2' O-methyl modified
  modified_base (19)..(19): 2' fluoro-modified
  misc_feature (19)..(20): Phosphorothioate linkage
  modified_base (20)..(20): 2' O-methyl modified
  misc_feature (20)..(21): Phosphorothioate linkage
  modified_base (21)..(21): 2' O-methyl modified
ggacuucaaccggcccugauu

SEQ ID NO: 14068 - RNA, 21 nt, Artificial Sequence
  Description of Artificial Sequence: Synthetic oligonucleotide
  modified_base (1)..(1): 2' fluoro-modified
  misc_feature (1)..(2): Phosphorothioate linkage
  modified_base (2)..(2): 2' O-methyl modified
  misc_feature (2)..(3): Phosphorothioate linkage
  modified_base (3)..(3): 2' fluoro-modified
  modified_base (4)..(4): 2' O-methyl modified
  modified_base (5)..(5): 2' fluoro-modified
  modified_base (6)..(6): 2' O-methyl modified
  modified_base (7)..(7): 2' fluoro-modified
  modified_base (8)..(8): 2' fluoro-modified
  modified_base (9)..(9): 2' fluoro-modified
  modified_base (10)..(10): 2' O-methyl modified
  modified_base (11)..(11): 2' fluoro-modified
  modified_base (12)..(12): 2' O-methyl modified
  modified_base (13)..(13): 2' fluoro-modified
  modified_base (14)..(14): 2' O-methyl modified
  modified_base (15)..(15): 2' fluoro-modified
  modified_base (16)..(16): 2' O-methyl modified
  modified_base (17)..(17): 2' fluoro-modified
  modified_base (18)..(18): 2' O-methyl modified
  modified_base (19)..(19): 2' fluoro-modified
  misc_feature (19)..(20): Phosphorothioate linkage
  modified_base (20)..(20): 2' O-methyl modified
  misc_feature (20)..(21): Phosphorothioate linkage
  modified_base (21)..(21): 2' O-methyl modified
uucaaccggcccugggaaauu

SEQ ID NO: 14069 - RNA, 21 nt, Artificial Sequence
  Description of Artificial Sequence: Synthetic oligonucleotide
  modified_base (1)..(1): 2' fluoro-modified
  misc_feature (1)..(2): Phosphorothioate linkage
  modified_base (2)..(2): 2' O-methyl modified
  misc_feature (2)..(3): Phosphorothioate linkage
  modified_base (3)..(3): 2' fluoro-modified
  modified_base (4)..(4): 2' O-methyl modified
  modified_base (5)..(5): 2' fluoro-modified
  modified_base (6)..(6): 2' O-methyl modified
  modified_base (7)..(7): 2' fluoro-modified
  modified_base (8)..(8): 2' fluoro-modified
  modified_base (9)..(9): 2' fluoro-modified
  modified_base (10)..(10): 2' O-methyl modified
  modified_base (11)..(11): 2' fluoro-modified
  modified_base (12)..(12): 2' O-methyl modified
  modified_base (13)..(13): 2' fluoro-modified
  modified_base (14)..(14): 2' O-methyl modified
  modified_base (15)..(15): 2' fluoro-modified
  modified_base (16)..(16): 2' O-methyl modified
  modified_base (17)..(17): 2' fluoro-modified
  modified_base (18)..(18): 2' O-methyl modified
  modified_base (19)..(19): 2' fluoro-modified
  misc_feature (19)..(20): Phosphorothioate linkage
  modified_base (20)..(20): 2' O-methyl modified
  misc_feature (20)..(21): Phosphorothioate linkage
  modified_base (21)..(21): 2' O-methyl modified
cugggaagccuacaaggcauu

SEQ ID NO: 14070 - RNA, 21 nt, Artificial Sequence
  Description of Artificial Sequence: Synthetic oligonucleotide
  modified_base (1)..(1): 2' fluoro-modified
  misc_feature (1)..(2): Phosphorothioate linkage
  modified_base (2)..(2): 2' O-methyl modified
  misc_feature (2)..(3): Phosphorothioate linkage
  modified_base (3)..(3): 2' fluoro-modified
  modified_base (4)..(4): 2' O-methyl modified
  modified_base (5)..(5): 2' fluoro-modified
  modified_base (6)..(6): 2' O-methyl modified
  modified_base (7)..(7): 2' fluoro-modified
  modified_base (8)..(8): 2' fluoro-modified
  modified_base (9)..(9): 2' fluoro-modified
  modified_base (10)..(10): 2' O-methyl modified
  modified_base (11)..(11): 2' fluoro-modified
  modified_base (12)..(12): 2' O-methyl modified
  modified_base (13)..(13): 2' fluoro-modified
  modified_base (14)..(14): 2' O-methyl modified
  modified_base (15)..(15): 2' fluoro-modified
  modified_base (16)..(16): 2' O-methyl modified
  modified_base (17)..(17): 2' fluoro-modified
  modified_base (18)..(18): 2' O-methyl modified
  modified_base (19)..(19): 2' fluoro-modified
  misc_feature (19)..(20): Phosphorothioate linkage
  modified_base (20)..(20): 2' O-methyl modified
  misc_feature (20)..(21): Phosphorothioate linkage
  modified_base (21)..(21): 2' O-methyl modified
ugggaagccuacaaggcgauu

SEQ ID NO: 14071 - RNA, 21 nt, Artificial Sequence
  Description of Artificial Sequence: Synthetic oligonucleotide
  modified_base (1)..(1): 2' fluoro-modified
  misc_feature (1)..(2): Phosphorothioate linkage
  modified_base (2)..(2): 2' O-methyl modified
  misc_feature (2)..(3): Phosphorothioate linkage
  modified_base (3)..(3): 2' fluoro-modified
  modified_base (4)..(4): 2' O-methyl modified
  modified_base (5)..(5): 2' fluoro-modified
  modified_base (6)..(6): 2' O-methyl modified
  modified_base (7)..(7): 2' fluoro-modified
  modified_base (8)..(8): 2' fluoro-modified
  modified_base (9)..(9): 2' fluoro-modified
  modified_base (10)..(10): 2' O-methyl modified
  modified_base (11)..(11): 2' fluoro-modified
  modified_base (12)..(12): 2' O-methyl modified
  modified_base (13)..(13): 2' fluoro-modified
  modified_base (14)..(14): 2' O-methyl modified
  modified_base (15)..(15): 2' fluoro-modified
  modified_base (16)..(16): 2' O-methyl modified
  modified_base (17)..(17): 2' fluoro-modified
  modified_base (18)..(18): 2' O-methyl modified
  modified_base (19)..(19): 2' fluoro-modified
  misc_feature (19)..(20): Phosphorothioate linkage
  modified_base (20)..(20): 2' O-methyl modified
  misc_feature (20)..(21): Phosphorothioate linkage
  modified_base (21)..(21): 2' O-methyl modified
gccuacaaggcgggguuuauu

SEQ ID NO: 14072 - RNA, 21 nt, Artificial Sequence
  Description of Artificial Sequence: Synthetic oligonucleotide
  modified_base (1)..(1): 2' fluoro-modified
  misc_feature (1)..(2): Phosphorothioate linkage
  modified_base (2)..(2): 2' O-methyl modified
  misc_feature (2)..(3): Phosphorothioate linkage
  modified_base (3)..(3): 2' fluoro-modified
  modified_base (4)..(4): 2' O-methyl modified
  modified_base (5)..(5): 2' fluoro-modified
  modified_base (6)..(6): 2' O-methyl modified
  modified_base (7)..(7): 2' fluoro-modified
  modified_base (8)..(8): 2' fluoro-modified
  modified_base (9)..(9): 2' fluoro-modified
  modified_base (10)..(10): 2' O-methyl modified
  modified_base (11)..(11): 2' fluoro-modified
  modified_base (12)..(12): 2' O-methyl modified
  modified_base (13)..(13): 2' fluoro-modified
  modified_base (14)..(14): 2' O-methyl modified
  modified_base (15)..(15): 2' fluoro-modified
  modified_base (16)..(16): 2' O-methyl modified
  modified_base (17)..(17): 2' fluoro-modified
  modified_base (18)..(18): 2' O-methyl modified
  modified_base (19)..(19): 2' fluoro-modified
  misc_feature (19)..(20): Phosphorothioate linkage
  modified_base (20)..(20): 2' O-methyl modified
  misc_feature (20)..(21): Phosphorothioate linkage
  modified_base (21)..(21): 2' O-methyl modified
uacaaggcgggguuugggauu

SEQ ID NO: 14073 - RNA, 21 nt, Artificial Sequence
  Description of Artificial Sequence: Synthetic oligonucleotide
  modified_base (1)..(1): 2' fluoro-modified
  misc_feature (1)..(2): Phosphorothioate linkage
  modified_base (2)..(2): 2' O-methyl modified
  misc_feature (2)..(3): Phosphorothioate linkage
  modified_base (3)..(3): 2' fluoro-modified
  modified_base (4)..(4): 2' O-methyl modified
  modified_base (5)..(5): 2' fluoro-modified
  modified_base (6)..(6): 2' O-methyl modified
  modified_base (7)..(7): 2' fluoro-modified
  modified_base (8)..(8): 2' fluoro-modified
  modified_base (9)..(9): 2' fluoro-modified
  modified_base (10)..(10): 2' O-methyl modified
  modified_base (11)..(11): 2' fluoro-modified
  modified_base (12)..(12): 2' O-methyl modified
  modified_base (13)..(13): 2' fluoro-modified
  modified_base (14)..(14): 2' O-methyl modified
  modified_base (15)..(15): 2' fluoro-modified
  modified_base (16)..(16): 2' O-methyl modified
  modified_base (17)..(17): 2' fluoro-modified
  modified_base (18)..(18): 2' O-methyl modified
  modified_base (19)..(19): 2' fluoro-modified
  misc_feature (19)..(20): Phosphorothioate linkage
  modified_base (20)..(20): 2' O-methyl modified
  misc_feature (20)..(21): Phosphorothioate linkage
  modified_base (21)..(21): 2' O-methyl modified
ggcgggguuuggggauccauu

SEQ ID NO: 14074 - RNA, 21 nt, Artificial Sequence
  Description of Artificial Sequence: Synthetic oligonucleotide
  modified_base (1)..(1): 2' fluoro-modified
  misc_feature (1)..(2): Phosphorothioate linkage
  modified_base (2)..(2): 2' O-methyl modified
  misc_feature (2)..(3): Phosphorothioate linkage
  modified_base (3)..(3): 2' fluoro-modified
  modified_base (4)..(4): 2' O-methyl modified
  modified_base (5)..(5): 2' fluoro-modified
  modified_base (6)..(6): 2' O-methyl modified
  modified_base (7)..(7): 2' fluoro-modified
  modified_base (8)..(8): 2' fluoro-modified
  modified_base (9)..(9): 2' fluoro-modified
  modified_base (10)..(10): 2' O-methyl modified
  modified_base (11)..(11): 2' fluoro-modified
  modified_base (12)..(12): 2' O-methyl modified
  modified_base (13)..(13): 2' fluoro-modified
  modified_base (14)..(14): 2' O-methyl modified
  modified_base (15)..(15): 2' fluoro-modified
  modified_base (16)..(16): 2' O-methyl modified
  modified_base (17)..(17): 2' fluoro-modified
  modified_base (18)..(18): 2' O-methyl modified
  modified_base (19)..(19): 2' fluoro-modified
  misc_feature (19)..(20): Phosphorothioate linkage
  modified_base (20)..(20): 2' O-methyl modified
  misc_feature (20)..(21): Phosphorothioate linkage
  modified_base (21)..(21): 2' O-methyl modified
gagaaggugcauagcaucauu

SEQ ID NO: 14075 - RNA, 21 nt, Artificial Sequence
  Description of Artificial Sequence: Synthetic oligonucleotide
  modified_base (1)..(1): 2' fluoro-modified
  misc_feature (1)..(2): Phosphorothioate linkage
  modified_base (2)..(2): 2' O-methyl modified
  misc_feature (2)..(3): Phosphorothioate linkage
  modified_base (3)..(3): 2' fluoro-modified
  modified_base (4)..(4): 2' O-methyl modified
  modified_base (5)..(5): 2' fluoro-modified
  modified_base (6)..(6): 2' O-methyl modified
  modified_base (7)..(7): 2' fluoro-modified
  modified_base (8)..(8): 2' fluoro-modified
  modified_base (9)..(9): 2' fluoro-modified
  modified_base (10)..(10): 2' O-methyl modified
  modified_base (11)..(11): 2' fluoro-modified
  modified_base (12)..(12): 2' O-methyl modified
  modified_base (13)..(13): 2' fluoro-modified
  modified_base (14)..(14): 2' O-methyl modified
  modified_base (15)..(15): 2' fluoro-modified
  modified_base (16)..(16): 2' O-methyl modified
  modified_base (17)..(17): 2' fluoro-modified
  modified_base (18)..(18): 2' O-methyl modified
  modified_base (19)..(19): 2' fluoro-modified
  misc_feature (19)..(20): Phosphorothioate linkage
  modified_base (20)..(20): 2' O-methyl modified
  misc_feature (20)..(21): Phosphorothioate linkage
  modified_base (21)..(21): 2' O-methyl modified
ggacugggauggcaacgcauu

SEQ ID NO: 14076 - RNA, 21 nt, Artificial Sequence
  Description of Artificial Sequence: Synthetic oligonucleotide
  modified_base (1)..(1): 2' fluoro-modified
  misc_feature (1)..(2): Phosphorothioate linkage
  modified_base (2)..(2): 2' O-methyl modified
  misc_feature (2)..(3): Phosphorothioate linkage
  modified_base (3)..(3): 2' fluoro-modified
  modified_base (4)..(4): 2' O-methyl modified
  modified_base (5)..(5): 2' fluoro-modified
  modified_base (6)..(6): 2' O-methyl modified
  modified_base (7)..(7): 2' fluoro-modified
  modified_base (8)..(8): 2' fluoro-modified
  modified_base (9)..(9): 2' fluoro-modified
  modified_base (10)..(10): 2' O-methyl modified
  modified_base (11)..(11): 2' fluoro-modified
  modified_base (12)..(12): 2' O-methyl modified
  modified_base (13)..(13): 2' fluoro-modified
  modified_base (14)..(14): 2' O-methyl modified
  modified_base (15)..(15): 2' fluoro-modified
  modified_base (16)..(16): 2' O-methyl modified
  modified_base (17)..(17): 2' fluoro-modified
  modified_base (18)..(18): 2' O-methyl modified
  modified_base (19)..(19): 2' fluoro-modified
  misc_feature (19)..(20): Phosphorothioate linkage
  modified_base (20)..(20): 2' O-methyl modified
  misc_feature (20)..(21): Phosphorothioate linkage
  modified_base (21)..(21): 2' O-methyl modified
gacugggauggcaacgccauu

SEQ ID NO: 14077 - RNA, 21 nt, Artificial Sequence
  Description of Artificial Sequence: Synthetic oligonucleotide
  modified_base (1)..(1): 2' fluoro-modified
  misc_feature (1)..(2): Phosphorothioate linkage
  modified_base (2)..(2): 2' O-methyl modified
  misc_feature (2)..(3): Phosphorothioate linkage
  modified_base (3)..(3): 2' fluoro-modified
  modified_base (4)..(4): 2' O-methyl modified
  modified_base (5)..(5): 2' fluoro-modified
  modified_base (6)..(6): 2' O-methyl modified
  modified_base (7)..(7): 2' fluoro-modified
  modified_base (8)..(8): 2' fluoro-modified
  modified_base (9)..(9): 2' fluoro-modified
  modified_base (10)..(10): 2' O-methyl modified
  modified_base (11)..(11): 2' fluoro-modified
  modified_base (12)..(12): 2' O-methyl modified
  modified_base (13)..(13): 2' fluoro-modified
  modified_base (14)..(14): 2' O-methyl modified
  modified_base (15)..(15): 2' fluoro-modified
  modified_base (16)..(16): 2' O-methyl modified
  modified_base (17)..(17): 2' fluoro-modified
  modified_base (18)..(18): 2' O-methyl modified
  modified_base (19)..(19): 2' fluoro-modified
  misc_feature (19)..(20): Phosphorothioate linkage
  modified_base (20)..(20): 2' O-methyl modified
  misc_feature (20)..(21): Phosphorothioate linkage
  modified_base (21)..(21): 2' O-methyl modified
ugggauggcaacgccgagauu

SEQ ID NO: 14078 - RNA, 21 nt, Artificial Sequence
  Description of Artificial Sequence: Synthetic oligonucleotide
  modified_base (1)..(1): 2' fluoro-modified
  misc_feature (1)..(2): Phosphorothioate linkage
  modified_base (2)..(2): 2' O-methyl modified
  misc_feature (2)..(3): Phosphorothioate linkage
  modified_base (3)..(3): 2' fluoro-modified
  modified_base (4)..(4): 2' O-methyl modified
  modified_base (5)..(5): 2' fluoro-modified
  modified_base (6)..(6): 2' O-methyl modified
  modified_base (7)..(7): 2' fluoro-modified
  modified_base (8)..(8): 2' fluoro-modified
  modified_base (9)..(9): 2' fluoro-modified
  modified_base (10)..(10): 2' O-methyl modified
  modified_base (11)..(11): 2' fluoro-modified
  modified_base (12)..(12): 2' O-methyl modified
  modified_base (13)..(13): 2' fluoro-modified
  modified_base (14)..(14): 2' O-methyl modified
  modified_base (15)..(15): 2' fluoro-modified
  modified_base (16)..(16): 2' O-methyl modified
  modified_base (17)..(17): 2' fluoro-modified
  modified_base (18)..(18): 2' O-methyl modified
  modified_base (19)..(19): 2' fluoro-modified
  misc_feature (19)..(20): Phosphorothioate linkage
  modified_base (20)..(20): 2' O-methyl modified
  misc_feature (20)..(21): Phosphorothioate linkage
  modified_base (21)..(21): 2' O-methyl modified
cgugcaccuggguggcgaauu

SEQ ID NO: 14079 - RNA, 21 nt, Artificial Sequence
  Description of Artificial Sequence: Synthetic oligonucleotide
  modified_base (1)..(1): 2' fluoro-modified
  misc_feature (1)..(2): Phosphorothioate linkage
  modified_base (2)..(2): 2' O-methyl modified
  misc_feature (2)..(3): Phosphorothioate linkage
  modified_base (3)..(3): 2' fluoro-modified
  modified_base (4)..(4): 2' O-methyl modified
  modified_base (5)..(5): 2' fluoro-modified
  modified_base (6)..(6): 2' O-methyl modified
  modified_base (7)..(7): 2' fluoro-modified
  modified_base (8)..(8): 2' fluoro-modified
  modified_base (9)..(9): 2' fluoro-modified
  modified_base (10)..(10): 2' O-methyl modified
  modified_base (11)..(11): 2' fluoro-modified
  modified_base (12)..(12): 2' O-methyl modified
  modified_base (13)..(13): 2' fluoro-modified
  modified_base (14)..(14): 2' O-methyl modified
  modified_base (15)..(15): 2' fluoro-modified
  modified_base (16)..(16): 2' O-methyl modified
  modified_base (17)..(17): 2' fluoro-modified
  modified_base (18)..(18): 2' O-methyl modified
  modified_base (19)..(19): 2' fluoro-modified
  misc_feature (19)..(20): Phosphorothioate linkage
  modified_base (20)..(20): 2' O-methyl modified
  misc_feature (20)..(21): Phosphorothioate linkage
  modified_base (21)..(21): 2' O-methyl modified
cuccguacccuucuccacauu

SEQ ID NO: 14080 - RNA, 21 nt, Artificial Sequence
  Description of Artificial Sequence: Synthetic oligonucleotide
  modified_base (1)..(1): 2' fluoro-modified
  misc_feature (1)..(2): Phosphorothioate linkage
  modified_base (2)..(2): 2' O-methyl modified
  misc_feature (2)..(3): Phosphorothioate linkage
  modified_base (3)..(3): 2' fluoro-modified
  modified_base (4)..(4): 2' O-methyl modified
  modified_base (5)..(5): 2' fluoro-modified
  modified_base (6)..(6): 2' O-methyl modified
  modified_base (7)..(7): 2' fluoro-modified
  modified_base (8)..(8): 2' fluoro-modified
  modified_base (9)..(9): 2' fluoro-modified
  modified_base (10)..(10): 2' O-methyl modified
  modified_base (11)..(11): 2' fluoro-modified
  modified_base (12)..(12): 2' O-methyl modified
  modified_base (13)..(13): 2' fluoro-modified
  modified_base (14)..(14): 2' O-methyl modified
  modified_base (15)..(15): 2' fluoro-modified
  modified_base (16)..(16): 2' O-methyl modified
  modified_base (17)..(17): 2' fluoro-modified
  modified_base (18)..(18): 2' O-methyl modified
  modified_base (19)..(19): 2' fluoro-modified
  misc_feature (19)..(20): Phosphorothioate linkage
  modified_base (20)..(20): 2' O-methyl modified
  misc_feature (20)..(21): Phosphorothioate linkage
  modified_base (21)..(21): 2' O-methyl modified
uccguacccuucuccacuauu

SEQ ID NO: 14081 - RNA, 21 nt, Artificial Sequence
  Description of Artificial Sequence: Synthetic oligonucleotide
  modified_base (1)..(1): 2' fluoro-modified
  misc_feature (1)..(2): Phosphorothioate linkage
  modified_base (2)..(2): 2' O-methyl modified
  misc_feature (2)..(3): Phosphorothioate linkage
  modified_base (3)..(3): 2' fluoro-modified
  modified_base (4)..(4): 2' O-methyl modified
  modified_base (5)..(5): 2' fluoro-modified
  modified_base (6)..(6): 2' O-methyl modified
  modified_base (7)..(7): 2' fluoro-modified
  modified_base (8)..(8): 2' fluoro-modified
  modified_base (9)..(9): 2' fluoro-modified
  modified_base (10)..(10): 2' O-methyl modified
  modified_base (11)..(11): 2' fluoro-modified
  modified_base (12)..(12): 2' O-methyl modified
  modified_base (13)..(13): 2' fluoro-modified
  modified_base (14)..(14): 2' O-methyl modified
  modified_base (15)..(15): 2' fluoro-modified
  modified_base (16)..(16): 2' O-methyl modified
  modified_base (17)..(17): 2' fluoro-modified
  modified_base (18)..(18): 2' O-methyl modified
  modified_base (19)..(19): 2' fluoro-modified
  misc_feature (19)..(20): Phosphorothioate linkage
  modified_base (20)..(20): 2' O-methyl modified
  misc_feature (20)..(21): Phosphorothioate linkage
  modified_base (21)..(21): 2' O-methyl modified
guacccuucuccacuuggauu

SEQ ID NO: 14082 - RNA, 21 nt, Artificial Sequence
  Description of Artificial Sequence: Synthetic oligonucleotide
  modified_base (1)..(1): 2' fluoro-modified
  misc_feature (1)..(2): Phosphorothioate linkage
  modified_base (2)..(2): 2' O-methyl modified
  misc_feature (2)..(3): Phosphorothioate linkage
  modified_base (3)..(3): 2' fluoro-modified
  modified_base (4)..(4): 2' O-methyl modified
  modified_base (5)..(5): 2' fluoro-modified
  modified_base (6)..(6): 2' O-methyl modified
  modified_base (7)..(7): 2' fluoro-modified
  modified_base (8)..(8): 2' fluoro-modified
  modified_base (9)..(9): 2' fluoro-modified
  modified_base (10)..(10): 2' O-methyl modified
  modified_base (11)..(11): 2' fluoro-modified
  modified_base (12)..(12): 2' O-methyl modified
  modified_base (13)..(13): 2' fluoro-modified
  modified_base (14)..(14): 2' O-methyl modified
  modified_base (15)..(15): 2' fluoro-modified
  modified_base (16)..(16): 2' O-methyl modified
  modified_base (17)..(17): 2' fluoro-modified
  modified_base (18)..(18): 2' O-methyl modified
  modified_base (19)..(19): 2' fluoro-modified
  misc_feature (19)..(20): Phosphorothioate linkage
  modified_base (20)..(20): 2' O-methyl modified
  misc_feature (20)..(21): Phosphorothioate linkage
  modified_base (21)..(21): 2' O-methyl modified
acuugggaccaggaucacauu

SEQ ID NO: 14083 - RNA, 21 nt, Artificial Sequence
  Description of Artificial Sequence: Synthetic oligonucleotide
  modified_base (1)..(1): 2' fluoro-modified
  misc_feature (1)..(2): Phosphorothioate linkage
  modified_base (2)..(2): 2' O-methyl modified
  misc_feature (2)..(3): Phosphorothioate linkage
  modified_base (3)..(3): 2' fluoro-modified
  modified_base (4)..(4): 2' O-methyl modified
  modified_base (5)..(5): 2' fluoro-modified
  modified_base (6)..(6): 2' O-methyl modified
  modified_base (7)..(7): 2' fluoro-modified
  modified_base (8)..(8): 2' fluoro-modified
  modified_base (9)..(9): 2' fluoro-modified
  modified_base (10)..(10): 2' O-methyl modified
  modified_base (11)..(11): 2' fluoro-modified
  modified_base (12)..(12): 2' O-methyl modified
  modified_base (13)..(13): 2' fluoro-modified
  modified_base (14)..(14): 2' O-methyl modified
  modified_base (15)..(15): 2' fluoro-modified
  modified_base (16)..(16): 2' O-methyl modified
  modified_base (17)..(17): 2' fluoro-modified
  modified_base (18)..(18): 2' O-methyl modified
  modified_base (19)..(19): 2' fluoro-modified
  misc_feature (19)..(20): Phosphorothioate linkage
  modified_base (20)..(20): 2' O-methyl modified
  misc_feature (20)..(21): Phosphorothioate linkage
  modified_base (21)..(21): 2' O-methyl modified
uugggaccaggaucacgaauu

SEQ ID NO: 14084 - RNA, 21 nt, Artificial Sequence
  Description of Artificial Sequence: Synthetic oligonucleotide
  modified_base (1)..(1): 2' fluoro-modified
  misc_feature (1)..(2): Phosphorothioate linkage
  modified_base (2)..(2): 2' O-methyl modified
  misc_feature (2)..(3): Phosphorothioate linkage
  modified_base (3)..(3): 2' fluoro-modified
  modified_base (4)..(4): 2' O-methyl modified
  modified_base (5)..(5): 2' fluoro-modified
  modified_base (6)..(6): 2' O-methyl modified
  modified_base (7)..(7): 2' fluoro-modified
  modified_base (8)..(8): 2' fluoro-modified
  modified_base (9)..(9): 2' fluoro-modified
  modified_base (10)..(10): 2' O-methyl modified
  modified_base (11)..(11): 2' fluoro-modified
  modified_base (12)..(12): 2' O-methyl modified
  modified_base (13)..(13): 2' fluoro-modified
  modified_base (14)..(14): 2' O-methyl modified
  modified_base (15)..(15): 2' fluoro-modified
  modified_base (16)..(16): 2' O-methyl modified
  modified_base (17)..(17): 2' fluoro-modified
  modified_base (18)..(18): 2' O-methyl modified
  modified_base (19)..(19): 2' fluoro-modified
  misc_feature (19)..(20): Phosphorothioate linkage
  modified_base (20)..(20): 2' O-methyl modified
  misc_feature (20)..(21): Phosphorothioate linkage
  modified_base (21)..(21): 2' O-methyl modified
gggaccaggaucacgaccauu

SEQ ID NO: 14085 - RNA, 21 nt, Artificial Sequence
  Description of Artificial Sequence: Synthetic oligonucleotide
  modified_base (1)..(1): 2' fluoro-modified
  misc_feature (1)..(2): Phosphorothioate linkage
  modified_base (2)..(2): 2' O-methyl modified
  misc_feature (2)..(3): Phosphorothioate linkage
  modified_base (3)..(3): 2' fluoro-modified
  modified_base (4)..(4): 2' O-methyl modified
  modified_base (5)..(5): 2' fluoro-modified
  modified_base (6)..(6): 2' O-methyl modified
  modified_base (7)..(7): 2' fluoro-modified
  modified_base (8)..(8): 2' fluoro-modified
  modified_base (9)..(9): 2' fluoro-modified
  modified_base (10)..(10): 2' O-methyl modified
  modified_base (11)..(11): 2' fluoro-modified
  modified_base (12)..(12): 2' O-methyl modified
  modified_base (13)..(13): 2' fluoro-modified
  modified_base (14)..(14): 2' O-methyl modified
  modified_base (15)..(15): 2' fluoro-modified
  modified_base (16)..(16): 2' O-methyl modified
  modified_base (17)..(17): 2' fluoro-modified
  modified_base (18)..(18): 2' O-methyl modified
  modified_base (19)..(19): 2' fluoro-modified
  misc_feature (19)..(20): Phosphorothioate linkage
  modified_base (20)..(20): 2' O-methyl modified
  misc_feature (20)..(21): Phosphorothioate linkage
  modified_base (21)..(21): 2' O-methyl modified
ggaccaggaucacgaccuauu

SEQ ID NO: 14086 - RNA, 21 nt, Artificial Sequence
  Description of Artificial Sequence: Synthetic oligonucleotide
  modified_base (1)..(1): 2' fluoro-modified
  misc_feature (1)..(2): Phosphorothioate linkage
  modified_base (2)..(2): 2' O-methyl modified
  misc_feature (2)..(3): Phosphorothioate linkage
  modified_base (3)..(3): 2' fluoro-modified
  modified_base (4)..(4): 2' O-methyl modified
  modified_base (5)..(5): 2' fluoro-modified
  modified_base (6)..(6): 2' O-methyl modified
  modified_base (7)..(7): 2' fluoro-modified
  modified_base (8)..(8): 2' fluoro-modified
  modified_base (9)..(9): 2' fluoro-modified
  modified_base (10)..(10): 2' O-methyl modified
  modified_base (11)..(11): 2' fluoro-modified
  modified_base (12)..(12): 2' O-methyl modified
  modified_base (13)..(13): 2' fluoro-modified
  modified_base (14)..(14): 2' O-methyl modified
  modified_base (15)..(15): 2' fluoro-modified
  modified_base (16)..(16): 2' O-methyl modified
  modified_base (17)..(17): 2' fluoro-modified
  modified_base (18)..(18): 2' O-methyl modified
  modified_base (19)..(19): 2' fluoro-modified
  misc_feature (19)..(20): Phosphorothioate linkage
  modified_base (20)..(20): 2' O-methyl modified
  misc_feature (20)..(21): Phosphorothioate linkage
  modified_base (21)..(21): 2' O-methyl modified
gaccaggaucacgaccucauu

SEQ ID NO: 14087 - RNA, 21 nt, Artificial Sequence
  Description of Artificial Sequence: Synthetic oligonucleotide
  modified_base (1)..(1): 2' fluoro-modified
  misc_feature (1)..(2): Phosphorothioate linkage
  modified_base (2)..(2): 2' O-methyl modified
  misc_feature (2)..(3): Phosphorothioate linkage
  modified_base (3)..(3): 2' fluoro-modified
  modified_base (4)..(4): 2' O-methyl modified
  modified_base (5)..(5): 2' fluoro-modified
  modified_base (6)..(6): 2' O-methyl modified
  modified_base (7)..(7): 2' fluoro-modified
  modified_base (8)..(8): 2' fluoro-modified
  modified_base (9)..(9): 2' fluoro-modified
  modified_base (10)..(10): 2' O-methyl modified
  modified_base (11)..(11): 2' fluoro-modified
  modified_base (12)..(12): 2' O-methyl modified
  modified_base (13)..(13): 2' fluoro-modified
  modified_base (14)..(14): 2' O-methyl modified
  modified_base (15)..(15): 2' fluoro-modified
  modified_base (16)..(16): 2' O-methyl modified
  modified_base (17)..(17): 2' fluoro-modified
  modified_base (18)..(18): 2' O-methyl modified
  modified_base (19)..(19): 2' fluoro-modified
  misc_feature (19)..(20): Phosphorothioate linkage
  modified_base (20)..(20): 2' O-methyl modified
  misc_feature (20)..(21): Phosphorothioate linkage
  modified_base (21)..(21): 2' O-methyl modified
ccaggaucacgaccuccgauu

SEQ ID NO: 14088 - RNA, 21 nt, Artificial Sequence
  Description of Artificial Sequence: Synthetic oligonucleotide
  modified_base (1)..(1): 2' fluoro-modified
  misc_feature (1)..(2): Phosphorothioate linkage
  modified_base (2)..(2): 2' O-methyl modified
  misc_feature (2)..(3): Phosphorothioate linkage
  modified_base (3)..(3): 2' fluoro-modified
  modified_base (4)..(4): 2' O-methyl modified
  modified_base (5)..(5): 2' fluoro-modified
  modified_base (6)..(6): 2' O-methyl modified
  modified_base (7)..(7): 2' fluoro-modified
  modified_base (8)..(8): 2' fluoro-modified
  modified_base (9)..(9): 2' fluoro-modified
  modified_base (10)..(10): 2' O-methyl modified
  modified_base (11)..(11): 2' fluoro-modified
  modified_base (12)..(12): 2' O-methyl modified
  modified_base (13)..(13): 2' fluoro-modified
  modified_base (14)..(14): 2' O-methyl modified
  modified_base (15)..(15): 2' fluoro-modified
  modified_base (16)..(16): 2' O-methyl modified
  modified_base (17)..(17): 2' fluoro-modified
  modified_base (18)..(18): 2' O-methyl modified
  modified_base (19)..(19): 2' fluoro-modified
  misc_feature (19)..(20): Phosphorothioate linkage
  modified_base (20)..(20): 2' O-methyl modified
  misc_feature (20)..(21): Phosphorothioate linkage
  modified_base (21)..(21): 2' O-methyl modified
caggaucacgaccuccgcauu

SEQ ID NO: 14089 - RNA, 21 nt, Artificial Sequence
  Description of Artificial Sequence: Synthetic oligonucleotide
  modified_base (1)..(1): 2' fluoro-modified
  misc_feature (1)..(2): Phosphorothioate linkage
  modified_base (2)..(2): 2' O-methyl modified
  misc_feature (2)..(3): Phosphorothioate linkage
  modified_base (3)..(3): 2' fluoro-modified
  modified_base (4)..(4): 2' O-methyl modified
  modified_base (5)..(5): 2' fluoro-modified
  modified_base (6)..(6): 2' O-methyl modified
  modified_base (7)..(7): 2' fluoro-modified
  modified_base (8)..(8): 2' fluoro-modified
  modified_base (9)..(9): 2' fluoro-modified
  modified_base (10)..(10): 2' O-methyl modified
  modified_base (11)..(11): 2' fluoro-modified
  modified_base (12)..(12): 2' O-methyl modified
  modified_base (13)..(13): 2' fluoro-modified
  modified_base (14)..(14): 2' O-methyl modified
  modified_base (15)..(15): 2' fluoro-modified
  modified_base (16)..(16): 2' O-methyl modified
  modified_base (17)..(17): 2' fluoro-modified
  modified_base (18)..(18): 2' O-methyl modified
  modified_base (19)..(19): 2' fluoro-modified
  misc_feature (19)..(20): Phosphorothioate linkage
  modified_base (20)..(20): 2' O-methyl modified
  misc_feature (20)..(21): Phosphorothioate linkage
  modified_base (21)..(21): 2' O-methyl modified
gaucacgaccuccgcaggauu

SEQ ID NO: 14090 - RNA, 21 nt, Artificial Sequence
  Description of Artificial Sequence: Synthetic oligonucleotide
  modified_base (1)..(1): 2' fluoro-modified
  misc_feature (1)..(2): Phosphorothioate linkage
  modified_base (2)..(2): 2' O-methyl modified
  misc_feature (2)..(3): Phosphorothioate linkage
  modified_base (3)..(3): 2' fluoro-modified
  modified_base (4)..(4): 2' O-methyl modified
  modified_base (5)..(5): 2' fluoro-modified
  modified_base (6)..(6): 2' O-methyl modified
  modified_base (7)..(7): 2' fluoro-modified
  modified_base (8)..(8): 2' fluoro-modified
  modified_base (9)..(9): 2' fluoro-modified
  modified_base (10)..(10): 2' O-methyl modified
  modified_base (11)..(11): 2' fluoro-modified
  modified_base (12)..(12): 2' O-methyl modified
  modified_base (13)..(13): 2' fluoro-modified
  modified_base (14)..(14): 2' O-methyl modified
  modified_base (15)..(15): 2' fluoro-modified
  modified_base (16)..(16): 2' O-methyl modified
  modified_base (17)..(17): 2' fluoro-modified
  modified_base (18)..(18): 2' O-methyl modified
  modified_base (19)..(19): 2' fluoro-modified
  misc_feature (19)..(20): Phosphorothioate linkage
  modified_base (20)..(20): 2' O-methyl modified
  misc_feature (20)..(21): Phosphorothioate linkage
  modified_base (21)..(21): 2' O-methyl modified
aucacgaccuccgcagggauu

SEQ ID NO: 14091 - RNA, 21 nt, Artificial Sequence
  Description of Artificial Sequence: Synthetic oligonucleotide
  modified_base (1)..(1): 2' fluoro-modified
  misc_feature (1)..(2): Phosphorothioate linkage
  modified_base (2)..(2): 2' O-methyl modified
  misc_feature (2)..(3): Phosphorothioate linkage
  modified_base (3)..(3): 2' fluoro-modified
  modified_base (4)..(4): 2' O-methyl modified
  modified_base (5)..(5): 2' fluoro-modified
  modified_base (6)..(6): 2' O-methyl modified
  modified_base (7)..(7): 2' fluoro-modified
  modified_base (8)..(8): 2' fluoro-modified
  modified_base (9)..(9): 2' fluoro-modified
  modified_base (10)..(10): 2' O-methyl modified
  modified_base (11)..(11): 2' fluoro-modified
  modified_base (12)..(12): 2' O-methyl modified
  modified_base (13)..(13): 2' fluoro-modified
  modified_base (14)..(14): 2' O-methyl modified
  modified_base (15)..(15): 2' fluoro-modified
  modified_base (16)..(16): 2' O-methyl modified
  modified_base (17)..(17): 2' fluoro-modified
  modified_base (18)..(18): 2' O-methyl modified
  modified_base (19)..(19): 2' fluoro-modified
  misc_feature (19)..(20): Phosphorothioate linkage
  modified_base (20)..(20): 2' O-methyl modified
  misc_feature (20)..(21): Phosphorothioate linkage
  modified_base (21)..(21): 2' O-methyl modified
cacgaccuccgcagggacauu

SEQ ID NO: 14092 - RNA, 21 nt, Artificial Sequence
  Description of Artificial Sequence: Synthetic oligonucleotide
  modified_base (1)..(1): 2' fluoro-modified
  misc_feature (1)..(2): Phosphorothioate linkage
  modified_base (2)..(2): 2' O-methyl modified
  misc_feature (2)..(3): Phosphorothioate linkage
  modified_base (3)..(3): 2' fluoro-modified
  modified_base (4)..(4): 2' O-methyl modified
  modified_base (5)..(5): 2' fluoro-modified
  modified_base (6)..(6): 2' O-methyl modified
  modified_base (7)..(7): 2' fluoro-modified
  modified_base (8)..(8): 2' fluoro-modified
  modified_base (9)..(9): 2' fluoro-modified
  modified_base (10)..(10): 2' O-methyl modified
  modified_base (11)..(11): 2' fluoro-modified
  modified_base (12)..(12): 2' O-methyl modified
  modified_base (13)..(13): 2' fluoro-modified
  modified_base (14)..(14): 2' O-methyl modified
  modified_base (15)..(15): 2' fluoro-modified
  modified_base (16)..(16): 2' O-methyl modified
  modified_base (17)..(17): 2' fluoro-modified
  modified_base (18)..(18): 2' O-methyl modified
  modified_base (19)..(19): 2' fluoro-modified
  misc_feature (19)..(20): Phosphorothioate linkage
  modified_base (20)..(20): 2' O-methyl modified
  misc_feature (20)..(21): Phosphorothioate linkage
  modified_base (21)..(21): 2' O-methyl modified
acgaccuccgcagggacaauu

SEQ ID NO: 14093 - RNA, 21 nt, Artificial Sequence
  Description of Artificial Sequence: Synthetic oligonucleotide
  modified_base (1)..(1): 2' fluoro-modified
  misc_feature (1)..(2): Phosphorothioate linkage
  modified_base (2)..(2): 2' O-methyl modified
  misc_feature (2)..(3): Phosphorothioate linkage
  modified_base (3)..(3): 2' fluoro-modified
  modified_base (4)..(4): 2' O-methyl modified
  modified_base (5)..(5): 2' fluoro-modified
  modified_base (6)..(6): 2' O-methyl modified
  modified_base (7)..(7): 2' fluoro-modified
  modified_base (8)..(8): 2' fluoro-modified
  modified_base (9)..(9): 2' fluoro-modified
  modified_base (10)..(10): 2' O-methyl modified
  modified_base (11)..(11): 2' fluoro-modified
  modified_base (12)..(12): 2' O-methyl modified
  modified_base (13)..(13): 2' fluoro-modified
  modified_base (14)..(14): 2' O-methyl modified
  modified_base (15)..(15): 2' fluoro-modified
  modified_base (16)..(16): 2' O-methyl modified
  modified_base (17)..(17): 2' fluoro-modified
  modified_base (18)..(18): 2' O-methyl modified
  modified_base (19)..(19): 2' fluoro-modified
  misc_feature (19)..(20): Phosphorothioate linkage
  modified_base (20)..(20): 2' O-methyl modified
  misc_feature (20)..(21): Phosphorothioate linkage
  modified_base (21)..(21): 2' O-methyl modified
cgaccuccgcagggacaaauu

SEQ ID NO: 14094 - RNA, 21 nt, Artificial Sequence
  Description of Artificial Sequence: Synthetic oligonucleotide
  modified_base (1)..(1): 2' fluoro-modified
  misc_feature (1)..(2): Phosphorothioate linkage
  modified_base (2)..(2): 2' O-methyl modified
  misc_feature (2)..(3): Phosphorothioate linkage
  modified_base (3)..(3): 2' fluoro-modified
  modified_base (4)..(4): 2' O-methyl modified
  modified_base (5)..(5): 2' fluoro-modified
  modified_base (6)..(6): 2' O-methyl modified
  modified_base (7)..(7): 2' fluoro-modified
  modified_base (8)..(8): 2' fluoro-modified
  modified_base (9)..(9): 2' fluoro-modified
  modified_base (10)..(10): 2' O-methyl modified
  modified_base (11)..(11): 2' fluoro-modified
  modified_base (12)..(12): 2' O-methyl modified
  modified_base (13)..(13): 2' fluoro-modified
  modified_base (14)..(14): 2' O-methyl modified
  modified_base (15)..(15): 2' fluoro-modified
  modified_base (16)..(16): 2' O-methyl modified
  modified_base (17)..(17): 2' fluoro-modified
  modified_base (18)..(18): 2' O-methyl modified
  modified_base (19)..(19): 2' fluoro-modified
  misc_feature (19)..(20): Phosphorothioate linkage
  modified_base (20)..(20): 2' O-methyl modified
  misc_feature (20)..(21): Phosphorothioate linkage
  modified_base (21)..(21): 2' O-methyl modified
uccgcagggacaagaacuauu

SEQ ID NO: 14095 - RNA, 21 nt, Artificial Sequence
  Description of Artificial Sequence: Synthetic oligonucleotide
  modified_base (1)..(1): 2' fluoro-modified
  misc_feature (1)..(2): Phosphorothioate linkage
  modified_base (2)..(2): 2' O-methyl modified
  misc_feature (2)..(3): Phosphorothioate linkage
  modified_base (3)..(3): 2' fluoro-modified
  modified_base (4)..(4): 2' O-methyl modified
  modified_base (5)..(5): 2' fluoro-modified
  modified_base (6)..(6): 2' O-methyl modified
  modified_base (7)..(7): 2' fluoro-modified
  modified_base (8)..(8): 2' fluoro-modified
  modified_base (9)..(9): 2' fluoro-modified
  modified_base (10)..(10): 2' O-methyl modified
  modified_base (11)..(11): 2' fluoro-modified
  modified_base (12)..(12): 2' O-methyl modified
  modified_base (13)..(13): 2' fluoro-modified
  modified_base (14)..(14): 2' O-methyl modified
  modified_base (15)..(15): 2' fluoro-modified
  modified_base (16)..(16): 2' O-methyl modified
  modified_base (17)..(17): 2' fluoro-modified
  modified_base (18)..(18): 2' O-methyl modified
  modified_base (19)..(19): 2' fluoro-modified
  misc_feature (19)..(20): Phosphorothioate linkage
  modified_base (20)..(20): 2' O-methyl modified
  misc_feature (20)..(21): Phosphorothioate linkage
  modified_base (21)..(21): 2' O-methyl modified
ccgcagggacaagaacugauu

SEQ ID NO: 14096 - RNA, 21 nt, Artificial Sequence
  Description of Artificial Sequence: Synthetic oligonucleotide
  modified_base (1)..(1): 2' fluoro-modified
  misc_feature (1)..(2): Phosphorothioate linkage
  modified_base (2)..(2): 2' O-methyl modified
  misc_feature (2)..(3): Phosphorothioate linkage
  modified_base (3)..(3): 2' fluoro-modified
  modified_base (4)..(4): 2' O-methyl modified
  modified_base (5)..(5): 2' fluoro-modified
  modified_base (6)..(6): 2' O-methyl modified
  modified_base (7)..(7): 2' fluoro-modified
  modified_base (8)..(8): 2' fluoro-modified
  modified_base (9)..(9): 2' fluoro-modified
  modified_base (10)..(10): 2' O-methyl modified
  modified_base (11)..(11): 2' fluoro-modified
  modified_base (12)..(12): 2' O-methyl modified
  modified_base (13)..(13): 2' fluoro-modified
  modified_base (14)..(14): 2' O-methyl modified
  modified_base (15)..(15): 2' fluoro-modified
  modified_base (16)..(16): 2' O-methyl modified
  modified_base (17)..(17): 2' fluoro-modified
  modified_base (18)..(18): 2' O-methyl modified
  modified_base (19)..(19): 2' fluoro-modified
  misc_feature (19)..(20): Phosphorothioate linkage
  modified_base (20)..(20): 2' O-methyl modified
  misc_feature (20)..(21): Phosphorothioate linkage
  modified_base (21)..(21): 2' O-methyl modified
ggccaguacuuccgcuccauu

SEQ ID NO: 14097 - RNA, 21 nt, Artificial Sequence
  Description of Artificial Sequence: Synthetic oligonucleotide
  modified_base (1)..(1): 2' fluoro-modified
  misc_feature (1)..(2): Phosphorothioate linkage
  modified_base (2)..(2): 2' O-methyl modified
  misc_feature (2)..(3): Phosphorothioate linkage
  modified_base (3)..(3): 2' fluoro-modified
  modified_base (4)..(4): 2' O-methyl modified
  modified_base (5)..(5): 2' fluoro-modified
  modified_base (6)..(6): 2' O-methyl modified
  modified_base (7)..(7): 2' fluoro-modified
  modified_base (8)..(8): 2' fluoro-modified
  modified_base (9)..(9): 2' fluoro-modified
  modified_base (10)..(10): 2' O-methyl modified
  modified_base (11)..(11): 2' fluoro-modified
  modified_base (12)..(12): 2' O-methyl modified
  modified_base (13)..(13): 2' fluoro-modified
  modified_base (14)..(14): 2' O-methyl modified
  modified_base (15)..(15): 2' fluoro-modified
  modified_base (16)..(16): 2' O-methyl modified
  modified_base (17)..(17): 2' fluoro-modified
  modified_base (18)..(18): 2' O-methyl modified
  modified_base (19)..(19): 2' fluoro-modified
  misc_feature (19)..(20): Phosphorothioate linkage
  modified_base (20)..(20): 2' O-methyl modified
  misc_feature (20)..(21): Phosphorothioate linkage
  modified_base (21)..(21): 2' O-methyl modified
gccaguacuuccgcuccaauu

SEQ ID NO: 14098 - RNA, 21 nt, Artificial Sequence
  Description of Artificial Sequence: Synthetic oligonucleotide
  modified_base (1)..(1): 2' fluoro-modified
  misc_feature (1)..(2): Phosphorothioate linkage
  modified_base (2)..(2): 2' O-methyl modified
  misc_feature (2)..(3): Phosphorothioate linkage
  modified_base (3)..(3): 2' fluoro-modified
  modified_base (4)..(4): 2' O-methyl modified
  modified_base (5)..(5): 2' fluoro-modified
  modified_base (6)..(6): 2' O-methyl modified
  modified_base (7)..(7): 2' fluoro-modified
  modified_base (8)..(8): 2' fluoro-modified
  modified_base (9)..(9): 2' fluoro-modified
  modified_base (10)..(10): 2' O-methyl modified
  modified_base (11)..(11): 2' fluoro-modified
  modified_base (12)..(12): 2' O-methyl modified
  modified_base (13)..(13): 2' fluoro-modified
  modified_base (14)..(14): 2' O-methyl modified
  modified_base (15)..(15): 2' fluoro-modified
  modified_base (16)..(16): 2' O-methyl modified
  modified_base (17)..(17): 2' fluoro-modified
  modified_base (18)..(18): 2' O-methyl modified
  modified_base (19)..(19): 2' fluoro-modified
  misc_feature (19)..(20): Phosphorothioate linkage
  modified_base (20)..(20): 2' O-methyl modified
  misc_feature (20)..(21): Phosphorothioate linkage
  modified_base (21)..(21): 2' O-methyl modified
ggcggggccgcuacuaccauu

SEQ ID NO: 14099 - RNA, 21 nt, Artificial Sequence
  Description of Artificial Sequence: Synthetic oligonucleotide
  modified_base (1)..(1): 2' fluoro-modified
  misc_feature (1)..(2): Phosphorothioate linkage
  modified_base (2)..(2): 2' O-methyl modified
  misc_feature (2)..(3): Phosphorothioate linkage
  modified_base (3)..(3): 2' fluoro-modified
  modified_base (4)..(4): 2' O-methyl modified
  modified_base (5)..(5): 2' fluoro-modified
  modified_base (6)..(6): 2' O-methyl modified
  modified_base (7)..(7): 2' fluoro-modified
  modified_base (8)..(8): 2' fluoro-modified
  modified_base (9)..(9): 2' fluoro-modified
  modified_base (10)..(10): 2' O-methyl modified
  modified_base (11)..(11): 2' fluoro-modified
  modified_base (12)..(12): 2' O-methyl modified
  modified_base (13)..(13): 2' fluoro-modified
  modified_base (14)..(14): 2' O-methyl modified
  modified_base (15)..(15): 2' fluoro-modified
  modified_base (16)..(16): 2' O-methyl modified
  modified_base (17)..(17): 2' fluoro-modified
  modified_base (18)..(18): 2' O-methyl modified
  modified_base (19)..(19): 2' fluoro-modified
  misc_feature (19)..(20): Phosphorothioate linkage
  modified_base (20)..(20): 2' O-methyl modified
  misc_feature (20)..(21): Phosphorothioate linkage
  modified_base (21)..(21): 2' O-methyl modified
caggccaccaccauguugauu

SEQ ID NO: 14100 - RNA, 21 nt, Artificial Sequence
  Description of Artificial Sequence: Synthetic oligonucleotide
  modified_base (1)..(1): 2' fluoro-modified
  misc_feature (1)..(2): Phosphorothioate linkage
  modified_base (2)..(2): 2' O-methyl modified
  misc_feature (2)..(3): Phosphorothioate linkage
  modified_base (3)..(3): 2' fluoro-modified
  modified_base (4)..(4): 2' O-methyl modified
  modified_base (5)..(5): 2' fluoro-modified
  modified_base (6)..(6): 2' O-methyl modified
  modified_base (7)..(7): 2' fluoro-modified
  modified_base (8)..(8): 2' fluoro-modified
  modified_base (9)..(9): 2' fluoro-modified
  modified_base (10)..(10): 2' O-methyl modified
  modified_base (11)..(11): 2' fluoro-modified
  modified_base (12)..(12): 2' O-methyl modified
  modified_base (13)..(13): 2' fluoro-modified
  modified_base (14)..(14): 2' O-methyl modified
  modified_base (15)..(15): 2' fluoro-modified
  modified_base (16)..(16): 2' O-methyl modified
  modified_base (17)..(17): 2' fluoro-modified
  modified_base (18)..(18): 2' O-methyl modified
  modified_base (19)..(19): 2' fluoro-modified
  misc_feature (19)..(20): Phosphorothioate linkage
  modified_base (20)..(20): 2' O-methyl modified
  misc_feature (20)..(21): Phosphorothioate linkage
  modified_base (21)..(21): 2' O-methyl modified
caccaccauguugauccaauu

SEQ ID NO: 14101 - RNA, 21 nt, Artificial Sequence
  Description of Artificial Sequence: Synthetic oligonucleotide
  modified_base (1)..(1): 2' fluoro-modified
  misc_feature (1)..(2): Phosphorothioate linkage
  modified_base (2)..(2): 2' O-methyl modified
  misc_feature (2)..(3): Phosphorothioate linkage
  modified_base (3)..(3): 2' fluoro-modified
  modified_base (4)..(4): 2' O-methyl modified
  modified_base (5)..(5): 2' fluoro-modified
  modified_base (6)..(6): 2' O-methyl modified
  modified_base (7)..(7): 2' fluoro-modified
  modified_base (8)..(8): 2' fluoro-modified
  modified_base (9)..(9): 2' fluoro-modified
  modified_base (10)..(10): 2' O-methyl modified
  modified_base (11)..(11): 2' fluoro-modified
  modified_base (12)..(12): 2' O-methyl modified
  modified_base (13)..(13): 2' fluoro-modified
  modified_base (14)..(14): 2' O-methyl modified
  modified_base (15)..(15): 2' fluoro-modified
  modified_base (16)..(16): 2' O-methyl modified
  modified_base (17)..(17): 2' fluoro-modified
  modified_base (18)..(18): 2' O-methyl modified
  modified_base (19)..(19): 2' fluoro-modified
  misc_feature (19)..(20): Phosphorothioate linkage
  modified_base (20)..(20): 2' O-methyl modified
  misc_feature (20)..(21): Phosphorothioate linkage
  modified_base (21)..(21): 2' O-methyl modified
accauguugauccagcccauu

SEQ ID NO: 14102 - RNA, 21 nt, Artificial Sequence
  Description of Artificial Sequence: Synthetic oligonucleotide
  modified_base (1)..(1): 2' fluoro-modified
  misc_feature (1)..(2): Phosphorothioate linkage
  modified_base (2)..(2): 2' O-methyl modified
  misc_feature (2)..(3): Phosphorothioate linkage
  modified_base (3)..(3): 2' fluoro-modified
  modified_base (4)..(4): 2' O-methyl modified
  modified_base (5)..(5): 2' fluoro-modified
  modified_base (6)..(6): 2' O-methyl modified
  modified_base (7)..(7): 2' fluoro-modified
  modified_base (8)..(8): 2' fluoro-modified
  modified_base (9)..(9): 2' fluoro-modified
  modified_base (10)..(10): 2' O-methyl modified
  modified_base (11)..(11): 2' fluoro-modified
  modified_base (12)..(12): 2' O-methyl modified
  modified_base (13)..(13): 2' fluoro-modified
  modified_base (14)..(14): 2' O-methyl modified
  modified_base (15)..(15): 2' fluoro-modified
  modified_base (16)..(16): 2' O-methyl modified
  modified_base (17)..(17): 2' fluoro-modified
  modified_base (18)..(18): 2' O-methyl modified
  modified_base (19)..(19): 2' fluoro-modified
  misc_feature (19)..(20): Phosphorothioate linkage
  modified_base (20)..(20): 2' O-methyl modified
  misc_feature (20)..(21): Phosphorothioate linkage
  modified_base (21)..(21): 2' O-methyl modified
ccauguugauccagcccaauu

SEQ ID NO: 14103 - RNA, 21 nt, Artificial Sequence
  Description of Artificial Sequence: Synthetic oligonucleotide
  modified_base (1)..(1): 2' fluoro-modified
  misc_feature (1)..(2): Phosphorothioate linkage
  modified_base (2)..(2): 2' O-methyl modified
  misc_feature (2)..(3): Phosphorothioate linkage
  modified_base (3)..(3): 2' fluoro-modified
  modified_base (4)..(4): 2' O-methyl modified
  modified_base (5)..(5): 2' fluoro-modified
  modified_base (6)..(6): 2' O-methyl modified
  modified_base (7)..(7): 2' fluoro-modified
  modified_base (8)..(8): 2' fluoro-modified
  modified_base (9)..(9): 2' fluoro-modified
  modified_base (10)..(10): 2' O-methyl modified
  modified_base (11)..(11): 2' fluoro-modified
  modified_base (12)..(12): 2' O-methyl modified
  modified_base (13)..(13): 2' fluoro-modified
  modified_base (14)..(14): 2' O-methyl modified
  modified_base (15)..(15): 2' fluoro-modified
  modified_base (16)..(16): 2' O-methyl modified
  modified_base (17)..(17): 2' fluoro-modified
  modified_base (18)..(18): 2' O-methyl modified
  modified_base (19)..(19): 2' fluoro-modified
  misc_feature (19)..(20): Phosphorothioate linkage
  modified_base (20)..(20): 2' O-methyl modified
  misc_feature (20)..(21): Phosphorothioate linkage
  modified_base (21)..(21): 2' O-methyl modified
gacucuuggcucugcccgauu

SEQ ID NO: 14104 - RNA, 21 nt, Artificial Sequence
  Description of Artificial Sequence: Synthetic oligonucleotide
  modified_base (1)..(1): 2' fluoro-modified
  misc_feature (1)..(2): Phosphorothioate linkage
  modified_base (2)..(2): 2' O-methyl modified
  misc_feature (2)..(3): Phosphorothioate linkage
  modified_base (3)..(3): 2' fluoro-modified
  modified_base (4)..(4): 2' O-methyl modified
  modified_base (5)..(5): 2' fluoro-modified
  modified_base (6)..(6): 2' O-methyl modified
  modified_base (7)..(7): 2' fluoro-modified
  modified_base (8)..(8): 2' fluoro-modified
  modified_base (9)..(9): 2' fluoro-modified
  modified_base (10)..(10): 2' O-methyl modified
  modified_base (11)..(11): 2' fluoro-modified
  modified_base (12)..(12): 2' O-methyl modified
  modified_base (13)..(13): 2' fluoro-modified
  modified_base (14)..(14): 2' O-methyl modified
  modified_base (15)..(15): 2' fluoro-modified
  modified_base (16)..(16): 2' O-methyl modified
  modified_base (17)..(17): 2' fluoro-modified
  modified_base (18)..(18): 2' O-methyl modified
  modified_base (19)..(19): 2' fluoro-modified
  misc_feature (19)..(20): Phosphorothioate linkage
  modified_base (20)..(20): 2' O-methyl modified
  misc_feature (20)..(21): Phosphorothioate linkage
  modified_base (21)..(21): 2' O-methyl modified
acucuuggcucugcccgaauu

SEQ ID NO: 14105 - RNA, 21 nt, Artificial Sequence
  Description of Artificial Sequence: Synthetic oligonucleotide
  modified_base (1)..(1): 2' fluoro-modified
  misc_feature (1)..(2): Phosphorothioate linkage
  modified_base (2)..(2): 2' O-methyl modified
  misc_feature (2)..(3): Phosphorothioate linkage
  modified_base (3)..(3): 2' fluoro-modified
  modified_base (4)..(4): 2' O-methyl modified
  modified_base (5)..(5): 2' fluoro-modified
  modified_base (6)..(6): 2' O-methyl modified
  modified_base (7)..(7): 2' fluoro-modified
  modified_base (8)..(8): 2' fluoro-modified
  modified_base (9)..(9): 2' fluoro-modified
  modified_base (10)..(10): 2' O-methyl modified
  modified_base (11)..(11): 2' fluoro-modified
  modified_base (12)..(12): 2' O-methyl modified
  modified_base (13)..(13): 2' fluoro-modified
  modified_base (14)..(14): 2' O-methyl modified
  modified_base (15)..(15): 2' fluoro-modified
  modified_base (16)..(16): 2' O-methyl modified
  modified_base (17)..(17): 2' fluoro-modified
  modified_base (18)..(18): 2' O-methyl modified
  modified_base (19)..(19): 2' fluoro-modified
  misc_feature (19)..(20): Phosphorothioate linkage
  modified_base (20)..(20): 2' O-methyl modified
  misc_feature (20)..(21): Phosphorothioate linkage
  modified_base (21)..(21): 2' O-methyl modified
ugccuccugagaucgaggauu

SEQ ID NO: 14106 - RNA, 21 nt, Artificial Sequence
  Description of Artificial Sequence: Synthetic oligonucleotide
  modified_base (1)..(1): 2' fluoro-modified
  misc_feature (1)..(2): Phosphorothioate linkage
  modified_base (2)..(2): 2' O-methyl modified
  misc_feature (2)..(3): Phosphorothioate linkage
  modified_base (3)..(3): 2' fluoro-modified
  modified_base (4)..(4): 2' O-methyl modified
  modified_base (5)..(5): 2' fluoro-modified
  modified_base (6)..(6): 2' O-methyl modified
  modified_base (7)..(7): 2' fluoro-modified
  modified_base (8)..(8): 2' fluoro-modified
  modified_base (9)..(9): 2' fluoro-modified
  modified_base (10)..(10): 2' O-methyl modified
  modified_base (11)..(11): 2' fluoro-modified
  modified_base (12)..(12): 2' O-methyl modified
  modified_base (13)..(13): 2' fluoro-modified
  modified_base (14)..(14): 2' O-methyl modified
  modified_base (15)..(15): 2' fluoro-modified
  modified_base (16)..(16): 2' O-methyl modified
  modified_base (17)..(17): 2' fluoro-modified
  modified_base (18)..(18): 2' O-methyl modified
  modified_base (19)..(19): 2' fluoro-modified
  misc_feature (19)..(20): Phosphorothioate linkage
  modified_base (20)..(20): 2' O-methyl modified
  misc_feature (20)..(21): Phosphorothioate linkage
  modified_base (21)..(21): 2' O-methyl modified
gccuccugagaucgaggcauu

SEQ ID NO: 14107 - RNA, 21 nt, Artificial Sequence
  Description of Artificial Sequence: Synthetic oligonucleotide
  modified_base (1)..(1): 2' fluoro-modified
  misc_feature (1)..(2): Phosphorothioate linkage
  modified_base (2)..(2): 2' O-methyl modified
  misc_feature (2)..(3): Phosphorothioate linkage
  modified_base (3)..(3): 2' fluoro-modified
  modified_base (4)..(4): 2' O-methyl modified
  modified_base (5)..(5): 2' fluoro-modified
  modified_base (6)..(6): 2' O-methyl modified
  modified_base (7)..(7): 2' fluoro-modified
  modified_base (8)..(8): 2' fluoro-modified
  modified_base (9)..(9): 2' fluoro-modified
  modified_base (10)..(10): 2' O-methyl modified
  modified_base (11)..(11): 2' fluoro-modified
  modified_base (12)..(12): 2' O-methyl modified
  modified_base (13)..(13): 2' fluoro-modified
  modified_base (14)..(14): 2' O-methyl modified
  modified_base (15)..(15): 2' fluoro-modified
  modified_base (16)..(16): 2' O-methyl modified
  modified_base (17)..(17): 2' fluoro-modified
  modified_base (18)..(18): 2' O-methyl modified
  modified_base (19)..(19): 2' fluoro-modified
  misc_feature (19)..(20): Phosphorothioate linkage
  modified_base (20)..(20): 2' O-methyl modified
  misc_feature (20)..(21): Phosphorothioate linkage
  modified_base (21)..(21): 2' O-methyl modified
ccuccugagaucgaggcuauu

SEQ ID NO: 14108 - RNA, 21 nt, Artificial Sequence
  Description of Artificial Sequence: Synthetic oligonucleotide
  modified_base (1)..(1): 2' fluoro-modified
  misc_feature (1)..(2): Phosphorothioate linkage
  modified_base (2)..(2): 2' O-methyl modified
  misc_feature (2)..(3): Phosphorothioate linkage
  modified_base (3)..(3): 2' fluoro-modified
  modified_base (4)..(4): 2' O-methyl modified
  modified_base (5)..(5): 2' fluoro-modified
  modified_base (6)..(6): 2' O-methyl modified
  modified_base (7)..(7): 2' fluoro-modified
  modified_base (8)..(8): 2' fluoro-modified
  modified_base (9)..(9): 2' fluoro-modified
  modified_base (10)..(10): 2' O-methyl modified
  modified_base (11)..(11): 2' fluoro-modified
  modified_base (12)..(12): 2' O-methyl modified
  modified_base (13)..(13): 2' fluoro-modified
  modified_base (14)..(14): 2' O-methyl modified
  modified_base (15)..(15): 2' fluoro-modified
  modified_base (16)..(16): 2' O-methyl modified
  modified_base (17)..(17): 2' fluoro-modified
  modified_base (18)..(18): 2' O-methyl modified
  modified_base (19)..(19): 2' fluoro-modified
  misc_feature (19)..(20): Phosphorothioate linkage
  modified_base (20)..(20): 2' O-methyl modified
  misc_feature (20)..(21): Phosphorothioate linkage
  modified_base (21)..(21): 2' O-methyl modified
agaggcguggaccaagggauu

SEQ ID NO: 14109 - RNA, 21 nt, Artificial Sequence
  Description of Artificial Sequence: Synthetic oligonucleotide
  modified_base (1)..(1): 2' fluoro-modified
  misc_feature (1)..(2): Phosphorothioate linkage
  modified_base (2)..(2): 2' O-methyl modified
  misc_feature (2)..(3): Phosphorothioate linkage
  modified_base (3)..(3): 2' fluoro-modified
  modified_base (4)..(4): 2' O-methyl modified
  modified_base (5)..(5): 2' fluoro-modified
  modified_base (6)..(6): 2' O-methyl modified
  modified_base (7)..(7): 2' fluoro-modified
  modified_base (8)..(8): 2' fluoro-modified
  modified_base (9)..(9): 2' fluoro-modified
  modified_base (10)..(10): 2' O-methyl modified
  modified_base (11)..(11): 2' fluoro-modified
  modified_base (12)..(12): 2' O-methyl modified
  modified_base (13)..(13): 2' fluoro-modified
  modified_base (14)..(14): 2' O-methyl modified
  modified_base (15)..(15): 2' fluoro-modified
  modified_base (16)..(16): 2' O-methyl modified
  modified_base (17)..(17): 2' fluoro-modified
  modified_base (18)..(18): 2' O-methyl modified
  modified_base (19)..(19): 2' fluoro-modified
  misc_feature (19)..(20): Phosphorothioate linkage
  modified_base (20)..(20): 2' O-methyl modified
  misc_feature (20)..(21): Phosphorothioate linkage
  modified_base (21)..(21): 2' O-methyl modified
gaggcguggaccaaggggauu

SEQ ID NO: 14110 - RNA, 21 nt, Artificial Sequence
  Description of Artificial Sequence: Synthetic oligonucleotide
  modified_base (1)..(1): 2' fluoro-modified
  misc_feature (1)..(2): Phosphorothioate linkage
  modified_base (2)..(2): 2' O-methyl modified
  misc_feature (2)..(3): Phosphorothioate linkage
  modified_base (3)..(3): 2' fluoro-modified
  modified_base (4)..(4): 2' O-methyl modified
  modified_base (5)..(5): 2' fluoro-modified
  modified_base (6)..(6): 2' O-methyl modified
  modified_base (7)..(7): 2' fluoro-modified
  modified_base (8)..(8): 2' fluoro-modified
  modified_base (9)..(9): 2' fluoro-modified
  modified_base (10)..(10): 2' O-methyl modified
  modified_base (11)..(11): 2' fluoro-modified
  modified_base (12)..(12): 2' O-methyl modified
  modified_base (13)..(13): 2' fluoro-modified
  modified_base (14)..(14): 2' O-methyl modified
  modified_base (15)..(15): 2' fluoro-modified
  modified_base (16)..(16): 2' O-methyl modified
  modified_base (17)..(17): 2' fluoro-modified
  modified_base (18)..(18): 2' O-methyl modified
  modified_base (19)..(19): 2' fluoro-modified
  misc_feature (19)..(20): Phosphorothioate linkage
  modified_base (20)..(20): 2' O-methyl modified
  misc_feature (20)..(21): Phosphorothioate linkage
  modified_base (21)..(21): 2' O-methyl modified
uggaccaaggggcauggaauu

SEQ ID NO: 14111 - RNA, 21 nt, Artificial Sequence
  Description of Artificial Sequence: Synthetic oligonucleotide
  modified_base (1)..(1): 2' fluoro-modified
  misc_feature (1)..(2): Phosphorothioate linkage
  modified_base (2)..(2): 2' O-methyl modified
  misc_feature (2)..(3): Phosphorothioate linkage
  modified_base (3)..(3): 2' fluoro-modified
  modified_base (4)..(4): 2' O-methyl modified
  modified_base (5)..(5): 2' fluoro-modified
  modified_base (6)..(6): 2' O-methyl modified
  modified_base (7)..(7): 2' fluoro-modified
  modified_base (8)..(8): 2' fluoro-modified
  modified_base (9)..(9): 2' fluoro-modified
  modified_base (10)..(10): 2' O-methyl modified
  modified_base (11)..(11): 2' fluoro-modified
  modified_base (12)..(12): 2' O-methyl modified
  modified_base (13)..(13): 2' fluoro-modified
  modified_base (14)..(14): 2' O-methyl modified
  modified_base (15)..(15): 2' fluoro-modified
  modified_base (16)..(16): 2' O-methyl modified
  modified_base (17)..(17): 2' fluoro-modified
  modified_base (18)..(18): 2' O-methyl modified
  modified_base (19)..(19): 2' fluoro-modified
  misc_feature (19)..(20): Phosphorothioate linkage
  modified_base (20)..(20): 2' O-methyl modified
  misc_feature (20)..(21): Phosphorothioate linkage
  modified_base (21)..(21): 2' O-methyl modified
uguuguguguagguccccauu

SEQ ID NO: 14112 - RNA, 21 nt, Artificial Sequence
  Description of Artificial Sequence: Synthetic oligonucleotide
  modified_base (1)..(1): 2' fluoro-modified
  misc_feature (1)..(2): Phosphorothioate linkage
  modified_base (2)..(2): 2' O-methyl modified
  misc_feature (2)..(3): Phosphorothioate linkage
  modified_base (3)..(3): 2' fluoro-modified
  modified_base (4)..(4): 2' O-methyl modified
  modified_base (5)..(5): 2' fluoro-modified
  modified_base (6)..(6): 2' O-methyl modified
  modified_base (7)..(7): 2' fluoro-modified
  modified_base (8)..(8): 2' fluoro-modified
  modified_base (9)..(9): 2' fluoro-modified
  modified_base (10)..(10): 2' O-methyl modified
  modified_base (11)..(11): 2' fluoro-modified
  modified_base (12)..(12): 2' O-methyl modified
  modified_base (13)..(13): 2' fluoro-modified
  modified_base (14)..(14): 2' O-methyl modified
  modified_base (15)..(15): 2' fluoro-modified
  modified_base (16)..(16): 2' O-methyl modified
  modified_base (17)..(17): 2' fluoro-modified
  modified_base (18)..(18): 2' O-methyl modified
  modified_base (19)..(19): 2' fluoro-modified
  misc_feature (19)..(20): Phosphorothioate linkage
  modified_base (20)..(20): 2' O-methyl modified
  misc_feature (20)..(21): Phosphorothioate linkage
  modified_base (21)..(21): 2' O-methyl modified
guguguagguccccugggauu

SEQ ID NO: 14113 - RNA, 21 nt, Artificial Sequence
  Description of Artificial Sequence: Synthetic oligonucleotide
  modified_base (1)..(1): 2' fluoro-modified
  misc_feature (1)..(2): Phosphorothioate linkage
  modified_base (2)..(2): 2' O-methyl modified
  misc_feature (2)..(3): Phosphorothioate linkage
  modified_base (3)..(3): 2' fluoro-modified
  modified_base (4)..(4): 2' O-methyl modified
  modified_base (5)..(5): 2' fluoro-modified
  modified_base (6)..(6): 2' O-methyl modified
  modified_base (7)..(7): 2' fluoro-modified
  modified_base (8)..(8): 2' fluoro-modified
  modified_base (9)..(9): 2' fluoro-modified
  modified_base (10)..(10): 2' O-methyl modified
  modified_base (11)..(11): 2' fluoro-modified
  modified_base (12)..(12): 2' O-methyl modified
  modified_base (13)..(13): 2' fluoro-modified
  modified_base (14)..(14): 2' O-methyl modified
  modified_base (15)..(15): 2' fluoro-modified
  modified_base (16)..(16): 2' O-methyl modified
  modified_base (17)..(17): 2' fluoro-modified
  modified_base (18)..(18): 2' O-methyl modified
  modified_base (19)..(19): 2' fluoro-modified
  misc_feature (19)..(20): Phosphorothioate linkage
  modified_base (20)..(20): 2' O-methyl modified
  misc_feature (20)..(21): Phosphorothioate linkage
  modified_base (21)..(21): 2' O-methyl modified
uguagguccccuggggacauu

SEQ ID NO: 14114 - RNA, 21 nt, Artificial Sequence
  Description of Artificial Sequence: Synthetic oligonucleotide
  modified_base (1)..(1): 2' O-methyl modified
  misc_feature (1)..(2): Phosphorothioate linkage
  modified_base (2)..(2): 2' O-methyl modified
  misc_feature (2)..(3): Phosphorothioate linkage
  modified_base (3)..(3): 2' O-methyl modified
  modified_base (4)..(4): 2' O-methyl modified
  modified_base (5)..(5): 2' fluoro-modified
  modified_base (6)..(6): 2' O-methyl modified
  modified_base (7)..(7): 2' fluoro-modified
  modified_base (8)..(8): 2' fluoro-modified
  modified_base (9)..(9): 2' fluoro-modified
  modified_base (10)..(10): 2' O-methyl modified
  modified_base (11)..(11): 2' O-methyl modified
  modified_base (12)..(12): 2' O-methyl modified
  modified_base (13)..(13): 2' O-methyl modified
  modified_base (14)..(14): 2' O-methyl modified
  modified_base (15)..(15): 2' O-methyl modified
  modified_base (16)..(16): 2' O-methyl modified
  modified_base (17)..(17): 2' O-methyl modified
  modified_base (18)..(18): 2' O-methyl modified
  modified_base (19)..(19): 2' O-methyl modified
  misc_feature (19)..(20): Phosphorothioate linkage
  modified_base (20)..(20): 2' O-methyl modified
  misc_feature (20)..(21): Phosphorothioate linkage
  modified_base (21)..(21): 2' O-methyl modified
ugugauccgauucuuuccauu

SEQ ID NO: 14115 - RNA, 21 nt, Artificial Sequence
  Description of Artificial Sequence: Synthetic oligonucleotide
  modified_base (1)..(1): 2' O-methyl modified
  misc_feature (1)..(2): Phosphorothioate linkage
  modified_base (2)..(2): 2' O-methyl modified
  misc_feature (2)..(3): Phosphorothioate linkage
  modified_base (3)..(3): 2' O-methyl modified
  modified_base (4)..(4): 2' O-methyl modified
  modified_base (5)..(5): 2' fluoro-modified
  modified_base (6)..(6): 2' O-methyl modified
  modified_base (7)..(7): 2' fluoro-modified
  modified_base (8)..(8): 2' fluoro-modified
  modified_base (9)..(9): 2' fluoro-modified
  modified_base (10)..(10): 2' O-methyl modified
  modified_base (11)..(11): 2' O-methyl modified
  modified_base (12)..(12): 2' O-methyl modified
  modified_base (13)..(13): 2' O-methyl modified
  modified_base (14)..(14): 2' O-methyl modified
  modified_base (15)..(15): 2' O-methyl modified
  modified_base (16)..(16): 2' O-methyl modified
  modified_base (17)..(17): 2' O-methyl modified
  modified_base (18)..(18): 2' O-methyl modified
  modified_base (19)..(19): 2' O-methyl modified
  misc_feature (19)..(20): Phosphorothioate linkage
  modified_base (20)..(20): 2' O-methyl modified
  misc_feature (20)..(21): Phosphorothioate linkage
  modified_base (21)..(21): 2' O-methyl modified
cugcgaauucagcaucugauu

SEQ ID NO: 14116 - RNA, 21 nt, Artificial Sequence
  Description of Artificial Sequence: Synthetic oligonucleotide
  modified_base (1)..(1): 2' O-methyl modified
  misc_feature (1)..(2): Phosphorothioate linkage
  modified_base (2)..(2): 2' O-methyl modified
  misc_feature (2)..(3): Phosphorothioate linkage
  modified_base (3)..(3): 2' O-methyl modified
  modified_base (4)..(4): 2' O-methyl modified
  modified_base (5)..(5): 2' fluoro-modified
  modified_base (6)..(6): 2' O-methyl modified
  modified_base (7)..(7): 2' fluoro-modified
  modified_base (8)..(8): 2' fluoro-modified
  modified_base (9)..(9): 2' fluoro-modified
  modified_base (10)..(10): 2' O-methyl modified
  modified_base (11)..(11): 2' O-methyl modified
  modified_base (12)..(12): 2' O-methyl modified
  modified_base (13)..(13): 2' O-methyl modified
  modified_base (14)..(14): 2' O-methyl modified
  modified_base (15)..(15): 2' O-methyl modified
  modified_base (16)..(16): 2' O-methyl modified
  modified_base (17)..(17): 2' O-methyl modified
  modified_base (18)..(18): 2' O-methyl modified
  modified_base (19)..(19): 2' O-methyl modified
  misc_feature (19)..(20): Phosphorothioate linkage
  modified_base (20)..(20): 2' O-methyl modified
  misc_feature (20)..(21): Phosphorothioate linkage
  modified_base (21)..(21): 2' O-methyl modified
ugcgaauucagcaucugcauu

SEQ ID NO: 14117 - RNA, 21 nt, Artificial Sequence
  Description of Artificial Sequence: Synthetic oligonucleotide
  modified_base (1)..(1): 2' O-methyl modified
  misc_feature (1)..(2): Phosphorothioate linkage
  modified_base (2)..(2): 2' O-methyl modified
  misc_feature (2)..(3): Phosphorothioate linkage
  modified_base (3)..(3): 2' O-methyl modified
  modified_base (4)..(4): 2' O-methyl modified
  modified_base (5)..(5): 2' fluoro-modified
  modified_base (6)..(6): 2' O-methyl modified
  modified_base (7)..(7): 2' fluoro-modified
  modified_base (8)..(8): 2' fluoro-modified
  modified_base (9)..(9): 2' fluoro-modified
  modified_base (10)..(10): 2' O-methyl modified
  modified_base (11)..(11): 2' O-methyl modified
  modified_base (12)..(12): 2' O-methyl modified
  modified_base (13)..(13): 2' O-methyl modified
  modified_base (14)..(14): 2' O-methyl modified
  modified_base (15)..(15): 2' O-methyl modified
  modified_base (16)..(16): 2' O-methyl modified
  modified_base (17)..(17): 2' O-methyl modified
  modified_base (18)..(18): 2' O-methyl modified
  modified_base (19)..(19): 2' O-methyl modified
  misc_feature (19)..(20): Phosphorothioate linkage
  modified_base (20)..(20): 2' O-methyl modified
  misc_feature (20)..(21): Phosphorothioate linkage
  modified_base (21)..(21): 2' O-methyl modified
gcgaauucagcaucugcaauu

SEQ ID NO: 14118 - RNA, 21 nt, Artificial Sequence
  Description of Artificial Sequence: Synthetic oligonucleotide
  modified_base (1)..(1): 2' O-methyl modified
  misc_feature (1)..(2): Phosphorothioate linkage
  modified_base (2)..(2): 2' O-methyl modified
  misc_feature (2)..(3): Phosphorothioate linkage
  modified_base (3)..(3): 2' O-methyl modified
  modified_base (4)..(4): 2' O-methyl modified
  modified_base (5)..(5): 2' fluoro-modified
  modified_base (6)..(6): 2' O-methyl modified
  modified_base (7)..(7): 2' fluoro-modified
  modified_base (8)..(8): 2' fluoro-modified
  modified_base (9)..(9): 2' fluoro-modified
  modified_base (10)..(10): 2' O-methyl modified
  modified_base (11)..(11): 2' O-methyl modified
  modified_base (12)..(12): 2' O-methyl modified
  modified_base (13)..(13): 2' O-methyl modified
  modified_base (14)..(14): 2' O-methyl modified
  modified_base (15)..(15): 2' O-methyl modified
  modified_base (16)..(16): 2' O-methyl modified
  modified_base (17)..(17): 2' O-methyl modified
  modified_base (18)..(18): 2' O-methyl modified
  modified_base (19)..(19): 2' O-methyl modified
  misc_feature (19)..(20): Phosphorothioate linkage
  modified_base (20)..(20): 2' O-methyl modified
  misc_feature (20)..(21): Phosphorothioate linkage
  modified_base (21)..(21): 2' O-methyl modified
aaagccaguuuggccuccauu

SEQ ID NO: 14119 - RNA, 21 nt, Artificial Sequence
  Description of Artificial Sequence: Synthetic oligonucleotide
  modified_base (1)..(1): 2' O-methyl modified
  misc_feature (1)..(2): Phosphorothioate linkage
  modified_base (2)..(2): 2' O-methyl modified
  misc_feature (2)..(3): Phosphorothioate linkage
  modified_base (3)..(3): 2' O-methyl modified
  modified_base (4)..(4): 2' O-methyl modified
  modified_base (5)..(5): 2' fluoro-modified
  modified_base (6)..(6): 2' O-methyl modified
  modified_base (7)..(7): 2' fluoro-modified
  modified_base (8)..(8): 2' fluoro-modified
  modified_base (9)..(9): 2' fluoro-modified
  modified_base (10)..(10): 2' O-methyl modified
  modified_base (11)..(11): 2' O-methyl modified
  modified_base (12)..(12): 2' O-methyl modified
  modified_base (13)..(13): 2' O-methyl modified
  modified_base (14)..(14): 2' O-methyl modified
  modified_base (15)..(15): 2' O-methyl modified
  modified_base (16)..(16): 2' O-methyl modified
  modified_base (17)..(17): 2' O-methyl modified
  modified_base (18)..(18): 2' O-methyl modified
  modified_base (19)..(19): 2' O-methyl modified
  misc_feature (19)..(20): Phosphorothioate linkage
  modified_base (20)..(20): 2' O-methyl modified
  misc_feature (20)..(21): Phosphorothioate linkage
  modified_base (21)..(21): 2' O-methyl modified
uggaccacaagcaccuagauu

SEQ ID NO: 14120 - RNA, 21 nt, Artificial Sequence
  Description of Artificial Sequence: Synthetic oligonucleotide
  modified_base (1)..(1): 2' O-methyl modified
  misc_feature (1)..(2): Phosphorothioate linkage
  modified_base (2)..(2): 2' O-methyl modified
  misc_feature (2)..(3): Phosphorothioate linkage
  modified_base (3)..(3): 2' O-methyl modified
  modified_base (4)..(4): 2' O-methyl modified
  modified_base (5)..(5): 2' fluoro-modified
  modified_base (6)..(6): 2' O-methyl modified
  modified_base (7)..(7): 2' fluoro-modified
  modified_base (8)..(8): 2' fluoro-modified
  modified_base (9)..(9): 2' fluoro-modified
  modified_base (10)..(10): 2' O-methyl modified
  modified_base (11)..(11): 2' O-methyl modified
  modified_base (12)..(12): 2' O-methyl modified
  modified_base (13)..(13): 2' O-methyl modified
  modified_base (14)..(14): 2' O-methyl modified
  modified_base (15)..(15): 2' O-methyl modified
  modified_base (16)..(16): 2' O-methyl modified
  modified_base (17)..(17): 2' O-methyl modified
  modified_base (18)..(18): 2' O-methyl modified
  modified_base (19)..(19): 2' O-methyl modified
  misc_feature (19)..(20): Phosphorothioate linkage
  modified_base (20)..(20): 2' O-methyl modified
  misc_feature (20)..(21): Phosphorothioate linkage
  modified_base (21)..(21): 2' O-methyl modified
cagaguggacuauuugaaauu

SEQ ID NO: 14121 - RNA, 21 nt, Artificial Sequence
  Description of Artificial Sequence: Synthetic oligonucleotide
  modified_base (1)..(1): 2' O-methyl modified
  misc_feature (1)..(2): Phosphorothioate linkage
  modified_base (2)..(2): 2' O-methyl modified
  misc_feature (2)..(3): Phosphorothioate linkage
  modified_base (3)..(3): 2' O-methyl modified
  modified_base (4)..(4): 2' O-methyl modified
  modified_base (5)..(5): 2' fluoro-modified
  modified_base (6)..(6): 2' O-methyl modified
  modified_base (7)..(7): 2' fluoro-modified
  modified_base (8)..(8): 2' fluoro-modified
  modified_base (9)..(9): 2' fluoro-modified
  modified_base (10)..(10): 2' O-methyl modified
  modified_base (11)..(11): 2' O-methyl modified
  modified_base (12)..(12): 2' O-methyl modified
  modified_base (13)..(13): 2' O-methyl modified
  modified_base (14)..(14): 2' O-methyl modified
  modified_base (15)..(15): 2' O-methyl modified
  modified_base (16)..(16): 2' O-methyl modified
  modified_base (17)..(17): 2' O-methyl modified
  modified_base (18)..(18): 2' O-methyl modified
  modified_base (19)..(19): 2' O-methyl modified
  misc_feature (19)..(20): Phosphorothioate linkage
  modified_base (20)..(20): 2' O-methyl modified
  misc_feature (20)..(21): Phosphorothioate linkage
  modified_base (21)..(21): 2' O-methyl modified
uuuuuggugaacugcaagauu

SEQ ID NO: 14122 - RNA, 21 nt, Artificial Sequence
  Description of Artificial Sequence: Synthetic oligonucleotide
  modified_base (1)..(1): 2' O-methyl modified
  misc_feature (1)..(2): Phosphorothioate linkage
  modified_base (2)..(2): 2' O-methyl modified
  misc_feature (2)..(3): Phosphorothioate linkage
  modified_base (3)..(3): 2' O-methyl modified
  modified_base (4)..(4): 2' O-methyl modified
  modified_base (5)..(5): 2' fluoro-modified
  modified_base (6)..(6): 2' O-methyl modified
  modified_base (7)..(7): 2' fluoro-modified
  modified_base (8)..(8): 2' fluoro-modified
  modified_base (9)..(9): 2' fluoro-modified
  modified_base (10)..(10): 2' O-methyl modified
  modified_base (11)..(11): 2' O-methyl modified
  modified_base (12)..(12): 2' O-methyl modified
  modified_base (13)..(13): 2' O-methyl modified
  modified_base (14)..(14): 2' O-methyl modified
  modified_base (15)..(15): 2' O-methyl modified
  modified_base (16)..(16): 2' O-methyl modified
  modified_base (17)..(17): 2' O-methyl modified
  modified_base (18)..(18): 2' O-methyl modified
  modified_base (19)..(19): 2' O-methyl modified
  misc_feature (19)..(20): Phosphorothioate linkage
  modified_base (20)..(20): 2' O-methyl modified
  misc_feature (20)..(21): Phosphorothioate linkage
  modified_base (21)..(21): 2' O-methyl modified
agcggcagaagcuuaagaauu

SEQ ID NO: 14123 - RNA, 21 nt, Artificial Sequence
  Description of Artificial Sequence: Synthetic oligonucleotide
  modified_base (1)..(1): 2' O-methyl modified
  misc_feature (1)..(2): Phosphorothioate linkage
  modified_base (2)..(2): 2' O-methyl modified
  misc_feature (2)..(3): Phosphorothioate linkage
  modified_base (3)..(3): 2' O-methyl modified
  modified_base (4)..(4): 2' O-methyl modified
  modified_base (5)..(5): 2' fluoro-modified
  modified_base (6)..(6): 2' O-methyl modified
  modified_base (7)..(7): 2' fluoro-modified
  modified_base (8)..(8): 2' fluoro-modified
  modified_base (9)..(9): 2' fluoro-modified
  modified_base (10)..(10): 2' O-methyl modified
  modified_base (11)..(11): 2' O-methyl modified
  modified_base (12)..(12): 2' O-methyl modified
  modified_base (13)..(13): 2' O-methyl modified
  modified_base (14)..(14): 2' O-methyl modified
  modified_base (15)..(15): 2' O-methyl modified
  modified_base (16)..(16): 2' O-methyl modified
  modified_base (17)..(17): 2' O-methyl modified
  modified_base (18)..(18): 2' O-methyl modified
  modified_base (19)..(19): 2' O-methyl modified
  misc_feature (19)..(20): Phosphorothioate linkage
  modified_base (20)..(20): 2' O-methyl modified
  misc_feature (20)..(21): Phosphorothioate linkage
  modified_base (21)..(21): 2' O-methyl modified
agcuuaagaagggaaucuauu

SEQ ID NO: 14124 - RNA, 21 nt, Artificial Sequence
  Description of Artificial Sequence: Synthetic oligonucleotide
  modified_base (1)..(1): 2' O-methyl modified
  misc_feature (1)..(2): Phosphorothioate linkage
  modified_base (2)..(2): 2' O-methyl modified
  misc_feature (2)..(3): Phosphorothioate linkage
  modified_base (3)..(3): 2' O-methyl modified
  modified_base (4)..(4): 2' O-methyl modified
  modified_base (5)..(5): 2' fluoro-modified
  modified_base (6)..(6): 2' O-methyl modified
  modified_base (7)..(7): 2' fluoro-modified
  modified_base (8)..(8): 2' fluoro-modified
  modified_base (9)..(9): 2' fluoro-modified
  modified_base (10)..(10): 2' O-methyl modified
  modified_base (11)..(11): 2' O-methyl modified
  modified_base (12)..(12): 2' O-methyl modified
  modified_base (13)..(13): 2' O-methyl modified
  modified_base (14)..(14): 2' O-methyl modified
  modified_base (15)..(15): 2' O-methyl modified
  modified_base (16)..(16): 2' O-methyl modified
  modified_base (17)..(17): 2' O-methyl modified
  modified_base (18)..(18): 2' O-methyl modified
  modified_base (19)..(19): 2' O-methyl modified
  misc_feature (19)..(20): Phosphorothioate linkage
  modified_base (20)..(20): 2' O-methyl modified
  misc_feature (20)..(21): Phosphorothioate linkage
  modified_base (21)..(21): 2' O-methyl modified
ggccaucuggaaacuuguauu

SEQ ID NO: 14125 - RNA, 21 nt, Artificial Sequence
  Description of Artificial Sequence: Synthetic oligonucleotide
  modified_base (1)..(1): 2' O-methyl modified
  misc_feature (1)..(2): Phosphorothioate linkage
  modified_base (2)..(2): 2' O-methyl modified
  misc_feature (2)..(3): Phosphorothioate linkage
  modified_base (3)..(3): 2' O-methyl modified
  modified_base (4)..(4): 2' O-methyl modified
  modified_base (5)..(5): 2' fluoro-modified
  modified_base (6)..(6): 2' O-methyl modified
  modified_base (7)..(7): 2' fluoro-modified
  modified_base (8)..(8): 2' fluoro-modified
  modified_base (9)..(9): 2' fluoro-modified
  modified_base (10)..(10): 2' O-methyl modified
  modified_base (11)..(11): 2' O-methyl modified
  modified_base (12)..(12): 2' O-methyl modified
  modified_base (13)..(13): 2' O-methyl modified
  modified_base (14)..(14): 2' O-methyl modified
  modified_base (15)..(15): 2' O-methyl modified
  modified_base (16)..(16): 2' O-methyl modified
  modified_base (17)..(17): 2' O-methyl modified
  modified_base (18)..(18): 2' O-methyl modified
  modified_base (19)..(19): 2' O-methyl modified
  misc_feature (19)..(20): Phosphorothioate linkage
  modified_base (20)..(20): 2' O-methyl modified
  misc_feature (20)..(21): Phosphorothioate linkage
  modified_base (21)..(21): 2' O-methyl modified
gccaucuggaaacuugugauu

SEQ ID NO: 14126 - RNA, 21 nt, Artificial Sequence
  Description of Artificial Sequence: Synthetic oligonucleotide
  modified_base (1)..(1): 2' O-methyl modified
  misc_feature (1)..(2): Phosphorothioate linkage
  modified_base (2)..(2): 2' O-methyl modified
  misc_feature (2)..(3): Phosphorothioate linkage
  modified_base (3)..(3): 2' O-methyl modified
  modified_base (4)..(4): 2' O-methyl modified
  modified_base (5)..(5): 2' fluoro-modified
  modified_base (6)..(6): 2' O-methyl modified
  modified_base (7)..(7): 2' fluoro-modified
  modified_base (8)..(8): 2' fluoro-modified
  modified_base (9)..(9): 2' fluoro-modified
  modified_base (10)..(10): 2' O-methyl modified
  modified_base (11)..(11): 2' O-methyl modified
  modified_base (12)..(12): 2' O-methyl modified
  modified_base (13)..(13): 2' O-methyl modified
  modified_base (14)..(14): 2' O-methyl modified
  modified_base (15)..(15): 2' O-methyl modified
  modified_base (16)..(16): 2' O-methyl modified
  modified_base (17)..(17): 2' O-methyl modified
  modified_base (18)..(18): 2' O-methyl modified
  modified_base (19)..(19): 2' O-methyl modified
  misc_feature (19)..(20): Phosphorothioate linkage
  modified_base (20)..(20): 2' O-methyl modified
  misc_feature (20)..(21): Phosphorothioate linkage
  modified_base (21)..(21): 2' O-methyl modified
augcguugccuccugagaauu

SEQ ID NO: 14127 - RNA, 21 nt, Artificial Sequence
  Description of Artificial Sequence: Synthetic oligonucleotide
  modified_base (1)..(1): 2' O-methyl modified
  misc_feature (1)..(2): Phosphorothioate linkage
  modified_base (2)..(2): 2' O-methyl modified
  misc_feature (2)..(3): Phosphorothioate linkage
  modified_base (3)..(3): 2' O-methyl modified
  modified_base (4)..(4): 2' O-methyl modified
  modified_base (5)..(5): 2' fluoro-modified
  modified_base (6)..(6): 2' O-methyl modified
  modified_base (7)..(7): 2' fluoro-modified
  modified_base (8)..(8): 2' fluoro-modified
  modified_base (9)..(9): 2' fluoro-modified
  modified_base (10)..(10): 2' O-methyl modified
  modified_base (11)..(11): 2' O-methyl modified
  modified_base (12)..(12): 2' O-methyl modified
  modified_base (13)..(13): 2' O-methyl modified
  modified_base (14)..(14): 2' O-methyl modified
  modified_base (15)..(15): 2' O-methyl modified
  modified_base (16)..(16): 2' O-methyl modified
  modified_base (17)..(17): 2' O-methyl modified
  modified_base (18)..(18): 2' O-methyl modified
  modified_base (19)..(19): 2' O-methyl modified
  misc_feature (19)..(20): Phosphorothioate linkage
  modified_base (20)..(20): 2' O-methyl modified
  misc_feature (20)..(21): Phosphorothioate linkage
  modified_base (21)..(21): 2' O-methyl modified
gaucgaggcugcaggauaauu

SEQ ID NO: 14128 - RNA, 21 nt, Artificial Sequence
  Description of Artificial Sequence: Synthetic oligonucleotide
  modified_base (1)..(1): 2' O-methyl modified
  misc_feature (1)..(2): Phosphorothioate linkage
  modified_base (2)..(2): 2' O-methyl modified
  misc_feature (2)..(3): Phosphorothioate linkage
  modified_base (3)..(3): 2' O-methyl modified
  modified_base (4)..(4): 2' O-methyl modified
  modified_base (5)..(5): 2' fluoro-modified
  modified_base (6)..(6): 2' O-methyl modified
  modified_base (7)..(7): 2' fluoro-modified
  modified_base (8)..(8): 2' fluoro-modified
  modified_base (9)..(9): 2' fluoro-modified
  modified_base (10)..(10): 2' O-methyl modified
  modified_base (11)..(11): 2' O-methyl modified
  modified_base (12)..(12): 2' O-methyl modified
  modified_base (13)..(13): 2' O-methyl modified
  modified_base (14)..(14): 2' O-methyl modified
  modified_base (15)..(15): 2' O-methyl modified
  modified_base (16)..(16): 2' O-methyl modified
  modified_base (17)..(17): 2' O-methyl modified
  modified_base (18)..(18): 2' O-methyl modified
  modified_base (19)..(19): 2' O-methyl modified
  misc_feature (19)..(20): Phosphorothioate linkage
  modified_base (20)..(20): 2' O-methyl modified
  misc_feature (20)..(21): Phosphorothioate linkage
  modified_base (21)..(21): 2' O-methyl modified
aucgaggcugcaggauauauu

SEQ ID NO: 14129 - RNA, 21 nt, Artificial Sequence
  Description of Artificial Sequence: Synthetic oligonucleotide
  modified_base (1)..(1): 2' O-methyl modified
  misc_feature (1)..(2): Phosphorothioate linkage
  modified_base (2)..(2): 2' O-methyl modified
  misc_feature (2)..(3): Phosphorothioate linkage
  modified_base (3)..(3): 2' O-methyl modified
  modified_base (4)..(4): 2' O-methyl modified
  modified_base (5)..(5): 2' fluoro-modified
  modified_base (6)..(6): 2' O-methyl modified
  modified_base (7)..(7): 2' fluoro-modified
  modified_base (8)..(8): 2' fluoro-modified
  modified_base (9)..(9): 2' fluoro-modified
  modified_base (10)..(10): 2' O-methyl modified
  modified_base (11)..(11): 2' O-methyl modified
  modified_base (12)..(12): 2' O-methyl modified
  modified_base (13)..(13): 2' O-methyl modified
  modified_base (14)..(14): 2' O-methyl modified
  modified_base (15)..(15): 2' O-methyl modified
  modified_base (16)..(16): 2' O-methyl modified
  modified_base (17)..(17): 2' O-methyl modified
  modified_base (18)..(18): 2' O-methyl modified
  modified_base (19)..(19): 2' O-methyl modified
  misc_feature (19)..(20): Phosphorothioate linkage
  modified_base (20)..(20): 2' O-methyl modified
  misc_feature (20)..(21): Phosphorothioate linkage
  modified_base (21)..(21): 2' O-methyl modified
ugcaggauaugcucagacauu

SEQ ID NO: 14130 - RNA, 21 nt, Artificial Sequence
  Description of Artificial Sequence: Synthetic oligonucleotide
  modified_base (1)..(1): 2' O-methyl modified
  misc_feature (1)..(2): Phosphorothioate linkage
  modified_base (2)..(2): 2' O-methyl modified
  misc_feature (2)..(3): Phosphorothioate linkage
  modified_base (3)..(3): 2' O-methyl modified
  modified_base (4)..(4): 2' O-methyl modified
  modified_base (5)..(5): 2' fluoro-modified
  modified_base (6)..(6): 2' O-methyl modified
  modified_base (7)..(7): 2' fluoro-modified
  modified_base (8)..(8): 2' fluoro-modified
  modified_base (9)..(9): 2' fluoro-modified
  modified_base (10)..(10): 2' O-methyl modified
  modified_base (11)..(11): 2' O-methyl modified
  modified_base (12)..(12): 2' O-methyl modified
  modified_base (13)..(13): 2' O-methyl modified
  modified_base (14)..(14): 2' O-methyl modified
  modified_base (15)..(15): 2' O-methyl modified
  modified_base (16)..(16): 2' O-methyl modified
  modified_base (17)..(17): 2' O-methyl modified
  modified_base (18)..(18): 2' O-methyl modified
  modified_base (19)..(19): 2' O-methyl modified
  misc_feature (19)..(20): Phosphorothioate linkage
  modified_base (20)..(20): 2' O-methyl modified
  misc_feature (20)..(21): Phosphorothioate linkage
  modified_base (21)..(21): 2' O-methyl modified
augcucagacucuagaggauu

SEQ ID NO: 14131 - RNA, 21 nt, Artificial Sequence
  Description of Artificial Sequence: Synthetic oligonucleotide
  modified_base (1)..(1): 2' O-methyl modified
  misc_feature (1)..(2): Phosphorothioate linkage
  modified_base (2)..(2): 2' O-methyl modified
  misc_feature (2)..(3): Phosphorothioate linkage
  modified_base (3)..(3): 2' O-methyl modified
  modified_base (4)..(4): 2' O-methyl modified
  modified_base (5)..(5): 2' fluoro-modified
  modified_base (6)..(6): 2' O-methyl modified
  modified_base (7)..(7): 2' fluoro-modified
  modified_base (8)..(8): 2' fluoro-modified
  modified_base (9)..(9): 2' fluoro-modified
  modified_base (10)..(10): 2' O-methyl modified
  modified_base (11)..(11): 2' O-methyl modified
  modified_base (12)..(12): 2' O-methyl modified
  modified_base (13)..(13): 2' O-methyl modified
  modified_base (14)..(14): 2' O-methyl modified
  modified_base (15)..(15): 2' O-methyl modified
  modified_base (16)..(16): 2' O-methyl modified
  modified_base (17)..(17): 2' O-methyl modified
  modified_base (18)..(18): 2' O-methyl modified
  modified_base (19)..(19): 2' O-methyl modified
  misc_feature (19)..(20): Phosphorothioate linkage
  modified_base (20)..(20): 2' O-methyl modified
  misc_feature (20)..(21): Phosphorothioate linkage
  modified_base (21)..(21): 2' O-methyl modified
ucaauggcggacucagucauu

SEQ ID NO: 14132 - RNA, 21 nt, Artificial Sequence
  Description of Artificial Sequence: Synthetic oligonucleotide
  modified_base (1)..(1): 2' O-methyl modified
  misc_feature (1)..(2): Phosphorothioate linkage
  modified_base (2)..(2): 2' O-methyl modified
  misc_feature (2)..(3): Phosphorothioate linkage
  modified_base (3)..(3): 2' O-methyl modified
  modified_base (4)..(4): 2' O-methyl modified
  modified_base (5)..(5): 2' fluoro-modified
  modified_base (6)..(6): 2' O-methyl modified
  modified_base (7)..(7): 2' fluoro-modified
  modified_base (8)..(8): 2' fluoro-modified
  modified_base (9)..(9): 2' fluoro-modified
  modified_base (10)..(10): 2' O-methyl modified
  modified_base (11)..(11): 2' O-methyl modified
  modified_base (12)..(12): 2' O-methyl modified
  modified_base (13)..(13): 2' O-methyl modified
  modified_base (14)..(14): 2' O-methyl modified
  modified_base (15)..(15): 2' O-methyl modified
  modified_base (16)..(16): 2' O-methyl modified
  modified_base (17)..(17): 2' O-methyl modified
  modified_base (18)..(18): 2' O-methyl modified
  modified_base (19)..(19): 2' O-methyl modified
  misc_feature (19)..(20): Phosphorothioate linkage
  modified_base (20)..(20): 2' O-methyl modified
  misc_feature (20)..(21): Phosphorothioate linkage
  modified_base (21)..(21): 2' O-methyl modified
cagaguucuuggaauaaaauu

SEQ ID NO: 14133 - RNA, 21 nt, Artificial Sequence
  Description of Artificial Sequence: Synthetic oligonucleotide
  modified_base (1)..(1): 2' O-methyl modified
  misc_feature (1)..(2): Phosphorothioate linkage
  modified_base (2)..(2): 2' O-methyl modified
  misc_feature (2)..(3): Phosphorothioate linkage
  modified_base (3)..(3): 2' O-methyl modified
  modified_base (4)..(4): 2' O-methyl modified
  modified_base (5)..(5): 2' fluoro-modified
  modified_base (6)..(6): 2' O-methyl modified
  modified_base (7)..(7): 2' fluoro-modified
  modified_base (8)..(8): 2' fluoro-modified
  modified_base (9)..(9): 2' fluoro-modified
  modified_base (10)..(10): 2' O-methyl modified
  modified_base (11)..(11): 2' O-methyl modified
  modified_base (12)..(12): 2' O-methyl modified
  modified_base (13)..(13): 2' O-methyl modified
  modified_base (14)..(14): 2' O-methyl modified
  modified_base (15)..(15): 2' O-methyl modified
  modified_base (16)..(16): 2' O-methyl modified
  modified_base (17)..(17): 2' O-methyl modified
  modified_base (18)..(18): 2' O-methyl modified
  modified_base (19)..(19): 2' O-methyl modified
  misc_feature (19)..(20): Phosphorothioate linkage
  modified_base (20)..(20): 2' O-methyl modified
  misc_feature (20)..(21): Phosphorothioate linkage
  modified_base (21)..(21): 2' O-methyl modified
gaguucuuggaauaaaagauu

SEQ ID NO: 14134 - RNA, 21 nt, Artificial Sequence
  Description of Artificial Sequence: Synthetic oligonucleotide
  modified_base (1)..(1): 2' O-methyl modified
  misc_feature (1)..(2): Phosphorothioate linkage
  modified_base (2)..(2): 2' fluoro-modified
  misc_feature (2)..(3): Phosphorothioate linkage
  modified_base (3)..(3): 2' O-methyl modified
  modified_base (4)..(4): 2' O-methyl modified
  modified_base (5)..(5): 2' O-methyl modified
  modified_base (6)..(6): 2' fluoro-modified
  modified_base (7)..(7): 2' O-methyl modified
  modified_base (8)..(8): 2' O-methyl modified
  modified_base (9)..(9): 2' O-methyl modified
  modified_base (10)..(10): 2' O-methyl modified
  modified_base (11)..(11): 2' O-methyl modified
  modified_base (12)..(12): 2' O-methyl modified
  modified_base (13)..(13): 2' O-methyl modified
  modified_base (14)..(14): 2' fluoro-modified
  modified_base (15)..(15): 2' O-methyl modified
  modified_base (16)..(16): 2' fluoro-modified
  modified_base (17)..(17): 2' O-methyl modified
  modified_base (18)..(18): 2' O-methyl modified
  modified_base (19)..(19): 2' O-methyl modified
  misc_feature (19)..(20): Phosphorothioate linkage
  modified_base (20)..(20): 2' O-methyl modified
  misc_feature (20)..(21): Phosphorothioate linkage
  modified_base (21)..(21): 2' O-methyl modified
uuucaaauaguccacucuguu

SEQ ID NO: 14135 - RNA, 21 nt, Artificial Sequence
  Description of Artificial Sequence: Synthetic oligonucleotide
  modified_base (1)..(1): 2' O-methyl modified
  misc_feature (1)..(2): Phosphorothioate linkage
  modified_base (2)..(2): 2' fluoro-modified
  misc_feature (2)..(3): Phosphorothioate linkage
  modified_base (3)..(3): 2' O-methyl modified
  modified_base (4)..(4): 2' O-methyl modified
  modified_base (5)..(5): 2' O-methyl modified
  modified_base (6)..(6): 2' fluoro-modified
  modified_base (7)..(7): 2' O-methyl modified
  modified_base (8)..(8): 2' O-methyl modified
  modified_base (9)..(9): 2' O-methyl modified
  modified_base (10)..(10): 2' O-methyl modified
  modified_base (11)..(11): 2' O-methyl modified
  modified_base (12)..(12): 2' O-methyl modified
  modified_base (13)..(13): 2' O-methyl modified
  modified_base (14)..(14): 2' fluoro-modified
  modified_base (15)..(15): 2' O-methyl modified
  modified_base (16)..(16): 2' fluoro-modified
  modified_base (17)..(17): 2' O-methyl modified
  modified_base (18)..(18): 2' O-methyl modified
  modified_base (19)..(19): 2' O-methyl modified
  misc_feature (19)..(20): Phosphorothioate linkage
  modified_base (20)..(20): 2' O-methyl modified
  misc_feature (20)..(21): Phosphorothioate linkage
  modified_base (21)..(21): 2' O-methyl modified
uagauucccuucuuaagcuuu

SEQ ID NO: 14136 - RNA, 21 nt, Artificial Sequence
  Description of Artificial Sequence: Synthetic oligonucleotide
  modified_base (1)..(1): 2' O-methyl modified
  misc_feature (1)..(2): Phosphorothioate linkage
  modified_base (2)..(2): 2' fluoro-modified
  misc_feature (2)..(3): Phosphorothioate linkage
  modified_base (3)..(3): 2' O-methyl modified
  modified_base (4)..(4): 2' O-methyl modified
  modified_base (5)..(5): 2' O-methyl modified
  modified_base (6)..(6): 2' fluoro-modified
  modified_base (7)..(7): 2' O-methyl modified
  modified_base (8)..(8): 2' O-methyl modified
  modified_base (9)..(9): 2' O-methyl modified
  modified_base (10)..(10): 2' O-methyl modified
  modified_base (11)..(11): 2' O-methyl modified
  modified_base (12)..(12): 2' O-methyl modified
  modified_base (13)..(13): 2' O-methyl modified
  modified_base (14)..(14): 2' fluoro-modified
  modified_base (15)..(15): 2' O-methyl modified
  modified_base (16)..(16): 2' fluoro-modified
  modified_base (17)..(17): 2' O-methyl modified
  modified_base (18)..(18): 2' O-methyl modified
  modified_base (19)..(19): 2' O-methyl modified
  misc_feature (19)..(20): Phosphorothioate linkage
  modified_base (20)..(20): 2' O-methyl modified
  misc_feature (20)..(21): Phosphorothioate linkage
  modified_base (21)..(21): 2' O-methyl modified
uuauccugcagccucgaucuu

SEQ ID NO: 14137 - RNA, 21 nt, Artificial Sequence
  Description of Artificial Sequence: Synthetic oligonucleotide
  modified_base (1)..(1): 2' O-methyl modified
  misc_feature (1)..(2): Phosphorothioate linkage
  modified_base (2)..(2): 2' fluoro-modified
  misc_feature (2)..(3): Phosphorothioate linkage
  modified_base (3)..(3): 2' O-methyl modified
  modified_base (4)..(4): 2' O-methyl modified
  modified_base (5)..(5): 2' O-methyl modified
  modified_base (6)..(6): 2' fluoro-modified
  modified_base (7)..(7): 2' O-methyl modified
  modified_base (8)..(8): 2' O-methyl modified
  modified_base (9)..(9): 2' O-methyl modified
  modified_base (10)..(10): 2' O-methyl modified
  modified_base (11)..(11): 2' O-methyl modified
  modified_base (12)..(12): 2' O-methyl modified
  modified_base (13)..(13): 2' O-methyl modified
  modified_base (14)..(14): 2' fluoro-modified
  modified_base (15)..(15): 2' O-methyl modified
  modified_base (16)..(16): 2' fluoro-modified
  modified_base (17)..(17): 2' O-methyl modified
  modified_base (18)..(18): 2' O-methyl modified
  modified_base (19)..(19): 2' O-methyl modified
  misc_feature (19)..(20): Phosphorothioate linkage
  modified_base (20)..(20): 2' O-methyl modified
  misc_feature (20)..(21): Phosphorothioate linkage
  modified_base (21)..(21): 2' O-methyl modified
uuuuauuccaagaacucuguu

SEQ ID NO: 14138 - RNA, 21 nt, Artificial Sequence
  Description of Artificial Sequence: Synthetic oligonucleotide
  modified_base (1)..(1): 2' O-methyl modified
  misc_feature (1)..(2): Phosphorothioate linkage
  modified_base (2)..(2): 2' fluoro-modified
  misc_feature (2)..(3): Phosphorothioate linkage
  modified_base (3)..(3): 2' O-methyl modified
  modified_base (4)..(4): 2' fluoro-modified
  modified_base (5)..(5): 2' O-methyl modified
  modified_base (6)..(6): 2' fluoro-modified
  modified_base (7)..(7): 2' O-methyl modified
  modified_base (8)..(8): 2' fluoro-modified
  modified_base (9)..(9): 2' fluoro-modified
  modified_base (10)..(10): 2' O-methyl modified
  modified_base (11)..(11): 2' O-methyl modified
  modified_base (12)..(12): 2' O-methyl modified
  modified_base (13)..(13): 2' O-methyl modified
  modified_base (14)..(14): 2' fluoro-modified
  modified_base (15)..(15): 2' O-methyl modified
  modified_base (16)..(16): 2' fluoro-modified
  modified_base (17)..(17): 2' O-methyl modified
  modified_base (18)..(18): 2' O-methyl modified
  modified_base (19)..(19): 2' O-methyl modified
  misc_feature (19)..(20): Phosphorothioate linkage
  modified_base (20)..(20): 2' O-methyl modified
  misc_feature (20)..(21): Phosphorothioate linkage
  modified_base (21)..(21): 2' O-methyl modified
uuucaaauaguccacucuguu

SEQ ID NO: 14139 - RNA, 21 nt, Artificial Sequence
  Description of Artificial Sequence: Synthetic oligonucleotide
  modified_base (1)..(1): 2' O-methyl modified
  misc_feature (1)..(2): Phosphorothioate linkage
  modified_base (2)..(2): 2' fluoro-modified
  misc_feature (2)..(3): Phosphorothioate linkage
  modified_base (3)..(3): 2' O-methyl modified
  modified_base (4)..(4): 2' fluoro-modified
  modified_base (5)..(5): 2' O-methyl modified
  modified_base (6)..(6): 2' fluoro-modified
  modified_base (7)..(7): 2' O-methyl modified
  modified_base (8)..(8): 2' fluoro-modified
  modified_base (9)..(9): 2' fluoro-modified
  modified_base (10)..(10): 2' O-methyl modified
  modified_base (11)..(11): 2' O-methyl modified
  modified_base (12)..(12): 2' O-methyl modified
  modified_base (13)..(13): 2' O-methyl modified
  modified_base (14)..(14): 2' fluoro-modified
  modified_base (15)..(15): 2' O-methyl modified
  modified_base (16)..(16): 2' fluoro-modified
  modified_base (17)..(17): 2' O-methyl modified
  modified_base (18)..(18): 2' O-methyl modified
  modified_base (19)..(19): 2' O-methyl modified
  misc_feature (19)..(20): Phosphorothioate linkage
  modified_base (20)..(20): 2' O-methyl modified
  misc_feature (20)..(21): Phosphorothioate linkage
  modified_base (21)..(21): 2' O-methyl modified
uagauucccuucuuaagcuuu

SEQ ID NO: 14140 - RNA, 21 nt, Artificial Sequence
  Description of Artificial Sequence: Synthetic oligonucleotide
  modified_base (1)..(1): 2' O-methyl modified
  misc_feature (1)..(2): Phosphorothioate linkage
  modified_base (2)..(2): 2' fluoro-modified
  misc_feature (2)..(3): Phosphorothioate linkage
  modified_base (3)..(3): 2' O-methyl modified
  modified_base (4)..(4): 2' fluoro-modified
  modified_base (5)..(5): 2' O-methyl modified
  modified_base (6)..(6): 2' fluoro-modified
  modified_base (7)..(7): 2' O-methyl modified
  modified_base (8)..(8): 2' fluoro-modified
  modified_base (9)..(9): 2' fluoro-modified
  modified_base (10)..(10): 2' O-methyl modified
  modified_base (11)..(11): 2' O-methyl modified
  modified_base (12)..(12): 2' O-methyl modified
  modified_base (13)..(13): 2' O-methyl modified
  modified_base (14)..(14): 2' fluoro-modified
  modified_base (15)..(15): 2' O-methyl modified
  modified_base (16)..(16): 2' fluoro-modified
  modified_base (17)..(17): 2' O-methyl modified
  modified_base (18)..(18): 2' O-methyl modified
  modified_base (19)..(19): 2' O-methyl modified
  misc_feature (19)..(20): Phosphorothioate linkage
  modified_base (20)..(20): 2' O-methyl modified
  misc_feature (20)..(21): Phosphorothioate linkage
  modified_base (21)..(21): 2' O-methyl modified
uuauccugcagccucgaucuu

SEQ ID NO: 14141 - RNA, 21 nt, Artificial Sequence
  Description of Artificial Sequence: Synthetic oligonucleotide
  modified_base (1)..(1): 2' O-methyl modified
  misc_feature (1)..(2): Phosphorothioate linkage
  modified_base (2)..(2): 2' fluoro-modified
  misc_feature (2)..(3): Phosphorothioate linkage
  modified_base (3)..(3): 2' O-methyl modified
  modified_base (4)..(4): 2' fluoro-modified
  modified_base (5)..(5): 2' O-methyl modified
  modified_base (6)..(6): 2' fluoro-modified
  modified_base (7)..(7): 2' O-methyl modified
  modified_base (8)..(8): 2' fluoro-modified
  modified_base (9)..(9): 2' fluoro-modified
  modified_base (10)..(10): 2' O-methyl modified
  modified_base (11)..(11): 2' O-methyl modified
  modified_base (12)..(12): 2' O-methyl modified
  modified_base (13)..(13): 2' O-methyl modified
  modified_base (14)..(14): 2' fluoro-modified
  modified_base (15)..(15): 2' O-methyl modified
  modified_base (16)..(16): 2' fluoro-modified
  modified_base (17)..(17): 2' O-methyl modified
  modified_base (18)..(18): 2' O-methyl modified
  modified_base (19)..(19): 2' O-methyl modified
  misc_feature (19)..(20): Phosphorothioate linkage
  modified_base (20)..(20): 2' O-methyl modified
  misc_feature (20)..(21): Phosphorothioate linkage
  modified_base (21)..(21): 2' O-methyl modified
uuuuauuccaagaacucuguu

SEQ ID NO: 14142 - RNA, 21 nt, Artificial Sequence
  Description of Artificial Sequence: Synthetic oligonucleotide
  modified_base (1)..(1): 2' O-methyl modified
  misc_feature (1)..(2): Phosphorothioate linkage
  modified_base (2)..(2): 2' fluoro-modified
  misc_feature (2)..(3): Phosphorothioate linkage
  modified_base (3)..(3): 2' O-methyl modified
  modified_base (4)..(4): 2' fluoro-modified
  modified_base (5)..(5): 2' O-methyl modified
  modified_base (6)..(6): 2' fluoro-modified
  modified_base (7)..(7): 2' O-methyl modified
  modified_base (8)..(8): 2' O-methyl modified
  modified_base (9)..(9): 2' O-methyl modified
  modified_base (10)..(10): 2' O-methyl modified
  modified_base (11)..(11): 2' O-methyl modified
  modified_base (12)..(12): 2' O-methyl modified
  modified_base (13)..(13): 2' O-methyl modified
  modified_base (14)..(14): 2' fluoro-modified
  modified_base (15)..(15): 2' O-methyl modified
  modified_base (16)..(16): 2' fluoro-modified
  modified_base (17)..(17): 2' O-methyl modified
  modified_base (18)..(18): 2' O-methyl modified
  modified_base (19)..(19): 2' O-methyl modified
  misc_feature (19)..(20): Phosphorothioate linkage
  modified_base (20)..(20): 2' O-methyl modified
  misc_feature (20)..(21): Phosphorothioate linkage
  modified_base (21)..(21): 2' O-methyl modified
uuucaaauaguccacucuguu

SEQ ID NO: 14143 - RNA, 21 nt, Artificial Sequence
  Description of Artificial Sequence: Synthetic oligonucleotide
  modified_base (1)..(1): 2' O-methyl modified
  misc_feature (1)..(2): Phosphorothioate linkage
  modified_base (2)..(2): 2' fluoro-modified
  misc_feature (2)..(3): Phosphorothioate linkage
  modified_base (3)..(3): 2' O-methyl modified
  modified_base (4)..(4): 2' fluoro-modified
  modified_base (5)..(5): 2' O-methyl modified
  modified_base (6)..(6): 2' fluoro-modified
  modified_base (7)..(7): 2' O-methyl modified
  modified_base (8)..(8): 2' O-methyl modified
  modified_base (9)..(9): 2' O-methyl modified
  modified_base (10)..(10): 2' O-methyl modified
  modified_base (11)..(11): 2' O-methyl modified
  modified_base (12)..(12): 2' O-methyl modified
  modified_base (13)..(13): 2' O-methyl modified
  modified_base (14)..(14): 2' fluoro-modified
  modified_base (15)..(15): 2' O-methyl modified
  modified_base (16)..(16): 2' fluoro-modified
  modified_base (17)..(17): 2' O-methyl modified
  modified_base (18)..(18): 2' O-methyl modified
  modified_base (19)..(19): 2' O-methyl modified
  misc_feature (19)..(20): Phosphorothioate linkage
  modified_base (20)..(20): 2' O-methyl modified
  misc_feature (20)..(21): Phosphorothioate linkage
  modified_base (21)..(21): 2' O-methyl modified
uagauucccuucuuaagcuuu

SEQ ID NO: 14144 - RNA, 21 nt, Artificial Sequence
  Description of Artificial Sequence: Synthetic oligonucleotide
  modified_base (1)..(1): 2' O-methyl modified
  misc_feature (1)..(2): Phosphorothioate linkage
  modified_base (2)..(2): 2' fluoro-modified
  misc_feature (2)..(3): Phosphorothioate linkage
  modified_base (3)..(3): 2' O-methyl modified
  modified_base (4)..(4): 2' fluoro-modified
  modified_base (5)..(5): 2' O-methyl modified
  modified_base (6)..(6): 2' fluoro-modified
  modified_base (7)..(7): 2' O-methyl modified
  modified_base (8)..(8): 2' O-methyl modified
  modified_base (9)..(9): 2' O-methyl modified
  modified_base (10)..(10): 2' O-methyl modified
  modified_base (11)..(11): 2' O-methyl modified
  modified_base (12)..(12): 2' O-methyl modified
  modified_base (13)..(13): 2' O-methyl modified
  modified_base (14)..(14): 2' fluoro-modified
  modified_base (15)..(15): 2' O-methyl modified
  modified_base (16)..(16): 2' fluoro-modified
  modified_base (17)..(17): 2' O-methyl modified
  modified_base (18)..(18): 2' O-methyl modified
  modified_base (19)..(19): 2' O-methyl modified
  misc_feature (19)..(20): Phosphorothioate linkage
  modified_base (20)..(20): 2' O-methyl modified
  misc_feature (20)..(21): Phosphorothioate linkage
  modified_base (21)..(21): 2' O-methyl modified
uuauccugcagccucgaucuu

SEQ ID NO: 14145 - RNA, 21 nt, Artificial Sequence
  Description of Artificial Sequence: Synthetic oligonucleotide
  modified_base (1)..(1): 2' O-methyl modified
  misc_feature (1)..(2): Phosphorothioate linkage
  modified_base (2)..(2): 2' fluoro-modified
  misc_feature (2)..(3): Phosphorothioate linkage
  modified_base (3)..(3): 2' O-methyl modified
  modified_base (4)..(4): 2' fluoro-modified
  modified_base (5)..(5): 2' O-methyl modified
  modified_base (6)..(6): 2' fluoro-modified
  modified_base (7)..(7): 2' O-methyl modified
  modified_base (8)..(8): 2' O-methyl modified
  modified_base (9)..(9): 2' O-methyl modified
  modified_base (10)..(10): 2' O-methyl modified
  modified_base (11)..(11): 2' O-methyl modified
  modified_base (12)..(12): 2' O-methyl modified
  modified_base (13)..(13): 2' O-methyl modified
  modified_base (14)..(14): 2' fluoro-modified
  modified_base (15)..(15): 2' O-methyl modified
  modified_base (16)..(16): 2' fluoro-modified
  modified_base (17)..(17): 2' O-methyl modified
  modified_base (18)..(18): 2' O-methyl modified
  modified_base (19)..(19): 2' O-methyl modified
  misc_feature (19)..(20): Phosphorothioate linkage
  modified_base (20)..(20): 2' O-methyl modified
  misc_feature (20)..(21): Phosphorothioate linkage
  modified_base (21)..(21): 2' O-methyl modified
uuuuauuccaagaacucuguu

SEQ ID NO: 14146 - RNA, 21 nt, Artificial Sequence
  Description of Artificial Sequence: Synthetic oligonucleotide
  modified_base (1)..(1): 2' O-methyl modified
  misc_feature (1)..(2): Phosphorothioate linkage
  modified_base (2)..(2): 2' fluoro-modified
  misc_feature (2)..(3): Phosphorothioate linkage
  modified_base (3)..(3): 2' O-methyl modified
  modified_base (4)..(4): 2' O-methyl modified
  modified_base (5)..(5): 2' O-methyl modified
  modified_base (6)..(6): 2' fluoro-modified
  modified_base (7)..(7): 2' O-methyl modified
  modified_base (8)..(8): 2' fluoro-modified
  modified_base (9)..(9): 2' O-methyl modified
  modified_base (10)..(10): 2' O-methyl modified
  modified_base (11)..(11): 2' O-methyl modified
  modified_base (12)..(12): 2' O-methyl modified
  modified_base (13)..(13): 2' O-methyl modified
  modified_base (14)..(14): 2' fluoro-modified
  modified_base (15)..(15): 2' O-methyl modified
  modified_base (16)..(16): 2' fluoro-modified
  modified_base (17)..(17): 2' O-methyl modified
  modified_base (18)..(18): 2' O-methyl modified
  modified_base (19)..(19): 2' O-methyl modified
  misc_feature (19)..(20): Phosphorothioate linkage
  modified_base (20)..(20): 2' O-methyl modified
  misc_feature (20)..(21): Phosphorothioate linkage
  modified_base (21)..(21): 2' O-methyl modified
uuucaaauaguccacucuguu

SEQ ID NO: 14147 - RNA, 21 nt, Artificial Sequence
  Description of Artificial Sequence: Synthetic oligonucleotide
  modified_base (1)..(1): 2' O-methyl modified
  misc_feature (1)..(2): Phosphorothioate linkage
  modified_base (2)..(2): 2' fluoro-modified
  misc_feature (2)..(3): Phosphorothioate linkage
  modified_base (3)..(3): 2' O-methyl modified
  modified_base (4)..(4): 2' O-methyl modified
  modified_base (5)..(5): 2' O-methyl modified
  modified_base (6)..(6): 2' fluoro-modified
  modified_base (7)..(7): 2' O-methyl modified
  modified_base (8)..(8): 2' fluoro-modified
  modified_base (9)..(9): 2' O-methyl modified
  modified_base (10)..(10): 2' O-methyl modified
  modified_base (11)..(11): 2' O-methyl modified
  modified_base (12)..(12): 2' O-methyl modified
  modified_base (13)..(13): 2' O-methyl modified
  modified_base (14)..(14): 2' fluoro-modified
  modified_base (15)..(15): 2' O-methyl modified
  modified_base (16)..(16): 2' fluoro-modified
  modified_base (17)..(17): 2' O-methyl modified
  modified_base (18)..(18): 2' O-methyl modified
  modified_base (19)..(19): 2' O-methyl modified
  misc_feature (19)..(20): Phosphorothioate linkage
  modified_base (20)..(20): 2' O-methyl modified
  misc_feature (20)..(21): Phosphorothioate linkage
  modified_base (21)..(21): 2' O-methyl modified
uagauucccuucuuaagcuuu

SEQ ID NO: 14148 - RNA, 21 nt, Artificial Sequence
  Description of Artificial Sequence: Synthetic oligonucleotide
  modified_base (1)..(1): 2' O-methyl modified
  misc_feature (1)..(2): Phosphorothioate linkage
  modified_base (2)..(2): 2' fluoro-modified
  misc_feature (2)..(3): Phosphorothioate linkage
  modified_base (3)..(3): 2' O-methyl modified
  modified_base (4)..(4): 2' O-methyl modified
  modified_base (5)..(5): 2' O-methyl modified
  modified_base (6)..(6): 2' fluoro-modified
  modified_base (7)..(7): 2' O-methyl modified
  modified_base (8)..(8): 2' fluoro-modified
  modified_base (9)..(9): 2' O-methyl modified
  modified_base (10)..(10): 2' O-methyl modified
  modified_base (11)..(11): 2' O-methyl modified
  modified_base (12)..(12): 2' O-methyl modified
  modified_base (13)..(13): 2' O-methyl modified
  modified_base (14)..(14): 2' fluoro-modified
  modified_base (15)..(15): 2' O-methyl modified
  modified_base (16)..(16): 2' fluoro-modified
  modified_base (17)..(17): 2' O-methyl modified
  modified_base (18)..(18): 2' O-methyl modified
  modified_base (19)..(19): 2' O-methyl modified
  misc_feature (19)..(20): Phosphorothioate linkage
  modified_base (20)..(20): 2' O-methyl modified
  misc_feature (20)..(21): Phosphorothioate linkage
  modified_base (21)..(21): 2' O-methyl modified
uuauccugcagccucgaucuu

SEQ ID NO: 14149 - RNA, 21 nt, Artificial Sequence
  Description of Artificial Sequence: Synthetic oligonucleotide
  modified_base (1)..(1): 2' O-methyl modified
  misc_feature (1)..(2): Phosphorothioate linkage
  modified_base (2)..(2): 2' fluoro-modified
  misc_feature (2)..(3): Phosphorothioate linkage
  modified_base (3)..(3): 2' O-methyl modified
  modified_base (4)..(4): 2' O-methyl modified
  modified_base (5)..(5): 2' O-methyl modified
  modified_base (6)..(6): 2' fluoro-modified
  modified_base (7)..(7): 2' O-methyl modified
  modified_base (8)..(8): 2' fluoro-modified
  modified_base (9)..(9): 2' O-methyl modified
  modified_base (10)..(10): 2' O-methyl modified
  modified_base (11)..(11): 2' O-methyl modified
  modified_base (12)..(12): 2' O-methyl modified
  modified_base (13)..(13): 2' O-methyl modified
  modified_base (14)..(14): 2' fluoro-modified
  modified_base (15)..(15): 2' O-methyl modified
  modified_base (16)..(16): 2' fluoro-modified
  modified_base (17)..(17): 2' O-methyl modified
  modified_base (18)..(18): 2' O-methyl modified
  modified_base (19)..(19): 2' O-methyl modified
  misc_feature (19)..(20): Phosphorothioate linkage
  modified_base (20)..(20): 2' O-methyl modified
  misc_feature (20)..(21): Phosphorothioate linkage
  modified_base (21)..(21): 2' O-methyl modified
uuuuauuccaagaacucuguu

SEQ ID NO: 14150 - RNA, 21 nt, Artificial Sequence
  Description of Artificial Sequence: Synthetic oligonucleotide
  modified_base (1)..(1): 2' O-methyl modified
  misc_feature (1)..(2): Phosphorothioate linkage
  modified_base (2)..(2): 2' fluoro-modified
  misc_feature (2)..(3): Phosphorothioate linkage
  modified_base (3)..(3): 2' O-methyl modified
  modified_base (4)..(4): 2' O-methyl modified
  modified_base (5)..(5): 2' O-methyl modified
  modified_base (6)..(6): 2' O-methyl modified
  modified_base (7)..(7): 2' O-methyl modified
  modified_base (8)..(8): 2' O-methyl modified
  modified_base (9)..(9): 2' O-methyl modified
  modified_base (10)..(10): 2' O-methyl modified
  modified_base (11)..(11): 2' O-methyl modified
  modified_base (12)..(12): 2' O-methyl modified
  modified_base (13)..(13): 2' O-methyl modified
  modified_base (14)..(14): 2' fluoro-modified
  modified_base (15)..(15): 2' O-methyl modified
  modified_base (16)..(16): 2' O-methyl modified
  modified_base (17)..(17): 2' O-methyl modified
  modified_base (18)..(18): 2' O-methyl modified
  modified_base (19)..(19): 2' O-methyl modified
  misc_feature (19)..(20): Phosphorothioate linkage
  modified_base (20)..(20): 2' O-methyl modified
  misc_feature (20)..(21): Phosphorothioate linkage
  modified_base (21)..(21): 2' O-methyl modified
uuucaaauaguccacucuguu

SEQ ID NO: 14151 - RNA, 21 nt, Artificial Sequence
  Description of Artificial Sequence: Synthetic oligonucleotide
  modified_base (1)..(1): 2' O-methyl modified
  misc_feature (1)..(2): Phosphorothioate linkage
  modified_base (2)..(2): 2' fluoro-modified
  misc_feature (2)..(3): Phosphorothioate linkage
  modified_base (3)..(3): 2' O-methyl modified
  modified_base (4)..(4): 2' O-methyl modified
  modified_base (5)..(5): 2' O-methyl modified
  modified_base (6)..(6): 2' O-methyl modified
  modified_base (7)..(7): 2' O-methyl modified
  modified_base (8)..(8): 2' O-methyl modified
  modified_base (9)..(9): 2' O-methyl modified
  modified_base (10)..(10): 2' O-methyl modified
  modified_base (11)..(11): 2' O-methyl modified
  modified_base (12)..(12): 2' O-methyl modified
  modified_base (13)..(13): 2' O-methyl modified
  modified_base (14)..(14): 2' fluoro-modified
  modified_base (15)..(15): 2' O-methyl modified
  modified_base (16)..(16): 2' O-methyl modified
  modified_base (17)..(17): 2' O-methyl modified
  modified_base (18)..(18): 2' O-methyl modified
  modified_base (19)..(19): 2' O-methyl modified
  misc_feature (19)..(20): Phosphorothioate linkage
  modified_base (20)..(20): 2' O-methyl modified
  misc_feature (20)..(21): Phosphorothioate linkage
  modified_base (21)..(21): 2' O-methyl modified
uagauucccuucuuaagcuuu

SEQ ID NO: 14152 - RNA, 21 nt, Artificial Sequence
  Description of Artificial Sequence: Synthetic oligonucleotide
  modified_base (1)..(1): 2' O-methyl modified
  misc_feature (1)..(2): Phosphorothioate linkage
  modified_base (2)..(2): 2' fluoro-modified
  misc_feature (2)..(3): Phosphorothioate linkage
  modified_base (3)..(3): 2' O-methyl modified
  modified_base (4)..(4): 2' O-methyl modified
  modified_base (5)..(5): 2' O-methyl modified
  modified_base (6)..(6): 2' O-methyl modified
  modified_base (7)..(7): 2' O-methyl modified
  modified_base (8)..(8): 2' O-methyl modified
  modified_base (9)..(9): 2' O-methyl modified
  modified_base (10)..(10): 2' O-methyl modified
  modified_base (11)..(11): 2' O-methyl modified
  modified_base (12)..(12): 2' O-methyl modified
  modified_base (13)..(13): 2' O-methyl modified
  modified_base (14)..(14): 2' fluoro-modified
  modified_base (15)..(15): 2' O-methyl modified
  modified_base (16)..(16): 2' O-methyl modified
  modified_base (17)..(17): 2' O-methyl modified
  modified_base (18)..(18): 2' O-methyl modified
  modified_base (19)..(19): 2' O-methyl modified
  misc_feature (19)..(20): Phosphorothioate linkage
  modified_base (20)..(20): 2' O-methyl modified
  misc_feature (20)..(21): Phosphorothioate linkage
  modified_base (21)..(21): 2' O-methyl modified
uuauccugcagccucgaucuu

SEQ ID NO: 14153 - RNA, 21 nt, Artificial Sequence
  Description of Artificial Sequence: Synthetic oligonucleotide
  modified_base (1)..(1): 2' O-methyl modified
  misc_feature (1)..(2): Phosphorothioate linkage
  modified_base (2)..(2): 2' fluoro-modified
  misc_feature (2)..(3): Phosphorothioate linkage
  modified_base (3)..(3): 2' O-methyl modified
  modified_base (4)..(4): 2' O-methyl modified
  modified_base (5)..(5): 2' O-methyl modified
  modified_base (6)..(6): 2' O-methyl modified
  modified_base (7)..(7): 2' O-methyl modified
  modified_base (8)..(8): 2' O-methyl modified
  modified_base (9)..(9): 2' O-methyl modified
  modified_base (10)..(10): 2' O-methyl modified
  modified_base (11)..(11): 2' O-methyl modified
  modified_base (12)..(12): 2' O-methyl modified
  modified_base (13)..(13): 2' O-methyl modified
  modified_base (14)..(14): 2' fluoro-modified
  modified_base (15)..(15): 2' O-methyl modified
  modified_base (16)..(16): 2' O-methyl modified
  modified_base (17)..(17): 2' O-methyl modified
  modified_base (18)..(18): 2' O-methyl modified
  modified_base (19)..(19): 2' O-methyl modified
  misc_feature (19)..(20): Phosphorothioate linkage
  modified_base (20)..(20): 2' O-methyl modified
  misc_feature (20)..(21): Phosphorothioate linkage
  modified_base (21)..(21): 2' O-methyl modified
uuuuauuccaagaacucuguu

SEQ ID NO: 14154 - RNA, 21 nt, Artificial Sequence
  Description of Artificial Sequence: Synthetic oligonucleotide
  modified_base (1)..(1): 2' O-methyl modified
  misc_feature (1)..(2): Phosphorothioate linkage
  modified_base (2)..(2): 2' fluoro-modified
  misc_feature (2)..(3): Phosphorothioate linkage
  modified_base (3)..(3): 2' O-methyl modified
  modified_base (4)..(4): 2' fluoro-modified
  modified_base (5)..(5): 2' O-methyl modified
  modified_base (6)..(6): 2' fluoro-modified
  modified_base (7)..(7): 2' O-methyl modified
  modified_base (8)..(8): 2' fluoro-modified
  modified_base (9)..(9): 2' O-methyl modified
  modified_base (10)..(10): 2' fluoro-modified
  modified_base (11)..(11): 2' O-methyl modified
  modified_base (12)..(12): 2' O-methyl modified
  modified_base (13)..(13): 2' O-methyl modified
  modified_base (14)..(14): 2' fluoro-modified
  modified_base (15)..(15): 2' O-methyl modified
  modified_base (16)..(16): 2' fluoro-modified
  modified_base (17)..(17): 2' O-methyl modified
  modified_base (18)..(18): 2' fluoro-modified
  modified_base (19)..(19): 2' O-methyl modified
  misc_feature (19)..(20): Phosphorothioate linkage
  modified_base (20)..(20): 2' O-methyl modified
  misc_feature (20)..(21): Phosphorothioate linkage
  modified_base (21)..(21): 2' O-methyl modified
uuucaaauaguccacucuguu

SEQ ID NO: 14155 - RNA, 21 nt, Artificial Sequence
  Description of Artificial Sequence: Synthetic oligonucleotide
  modified_base (1)..(1): 2' O-methyl modified
  misc_feature (1)..(2): Phosphorothioate linkage
  modified_base (2)..(2): 2' fluoro-modified
  misc_feature (2)..(3): Phosphorothioate linkage
  modified_base (3)..(3): 2' O-methyl modified
  modified_base (4)..(4): 2' fluoro-modified
  modified_base (5)..(5): 2' O-methyl modified
  modified_base (6)..(6): 2' fluoro-modified
  modified_base (7)..(7): 2' O-methyl modified
  modified_base (8)..(8): 2' fluoro-modified
  modified_base (9)..(9): 2' O-methyl modified
  modified_base (10)..(10): 2' fluoro-modified
  modified_base (11)..(11): 2' O-methyl modified
  modified_base (12)..(12): 2' O-methyl modified
  modified_base (13)..(13): 2' O-methyl modified
  modified_base (14)..(14): 2' fluoro-modified
  modified_base (15)..(15): 2' O-methyl modified
  modified_base (16)..(16): 2' fluoro-modified
  modified_base (17)..(17): 2' O-methyl modified
  modified_base (18)..(18): 2' fluoro-modified
  modified_base (19)..(19): 2' O-methyl modified
  misc_feature (19)..(20): Phosphorothioate linkage
  modified_base (20)..(20): 2' O-methyl modified
  misc_feature (20)..(21): Phosphorothioate linkage
  modified_base (21)..(21): 2' O-methyl modified
uagauucccuucuuaagcuuu

SEQ ID NO: 14156 - RNA, 21 nt, Artificial Sequence
  Description of Artificial Sequence: Synthetic oligonucleotide
  modified_base (1)..(1): 2' O-methyl modified
  misc_feature (1)..(2): Phosphorothioate linkage
  modified_base (2)..(2): 2' fluoro-modified
  misc_feature (2)..(3): Phosphorothioate linkage
  modified_base (3)..(3): 2' O-methyl modified
  modified_base (4)..(4): 2' fluoro-modified
  modified_base (5)..(5): 2' O-methyl modified
  modified_base (6)..(6): 2' fluoro-modified
  modified_base (7)..(7): 2' O-methyl modified
  modified_base (8)..(8): 2' fluoro-modified
  modified_base (9)..(9): 2' O-methyl modified
  modified_base (10)..(10): 2' fluoro-modified
  modified_base (11)..(11): 2' O-methyl modified
  modified_base (12)..(12): 2' O-methyl modified
  modified_base (13)..(13): 2' O-methyl modified
  modified_base (14)..(14): 2' fluoro-modified
  modified_base (15)..(15): 2' O-methyl modified
  modified_base (16)..(16): 2' fluoro-modified
  modified_base (17)..(17): 2' O-methyl modified
  modified_base (18)..(18): 2' fluoro-modified
  modified_base (19)..(19): 2' O-methyl modified
  misc_feature (19)..(20): Phosphorothioate linkage
  modified_base (20)..(20): 2' O-methyl modified
  misc_feature (20)..(21): Phosphorothioate linkage
  modified_base (21)..(21): 2' O-methyl modified
uuauccugcagccucgaucuu

SEQ ID NO: 14157 - RNA, 21 nt, Artificial Sequence
  Description of Artificial Sequence: Synthetic oligonucleotide
  modified_base (1)..(1): 2' O-methyl modified
  misc_feature (1)..(2): Phosphorothioate linkage
  modified_base (2)..(2): 2' fluoro-modified
  misc_feature (2)..(3): Phosphorothioate linkage
  modified_base (3)..(3): 2' O-methyl modified
  modified_base (4)..(4): 2' fluoro-modified
  modified_base (5)..(5): 2' O-methyl modified
  modified_base (6)..(6): 2' fluoro-modified
  modified_base (7)..(7): 2' O-methyl modified
  modified_base (8)..(8): 2' fluoro-modified
  modified_base (9)..(9): 2' O-methyl modified
  modified_base (10)..(10): 2' fluoro-modified
  modified_base (11)..(11): 2' O-methyl modified
  modified_base (12)..(12): 2' O-methyl modified
  modified_base (13)..(13): 2' O-methyl modified
  modified_base (14)..(14): 2' fluoro-modified
  modified_base (15)..(15): 2' O-methyl modified
  modified_base (16)..(16): 2' fluoro-modified
  modified_base (17)..(17): 2' O-methyl modified
  modified_base (18)..(18): 2' fluoro-modified
  modified_base (19)..(19): 2' O-methyl modified
  misc_feature (19)..(20): Phosphorothioate linkage
  modified_base (20)..(20): 2' O-methyl modified
  misc_feature (20)..(21): Phosphorothioate linkage
  modified_base (21)..(21): 2' O-methyl modified
uuuuauuccaagaacucuguu

SEQ ID NO: 14158 - RNA, 21 nt, Artificial Sequence
  Description of Artificial Sequence: Synthetic oligonucleotide
  modified_base (1)..(1): 2' O-methyl modified
  misc_feature (1)..(2): Phosphorothioate linkage
  modified_base (2)..(2): 2' fluoro-modified
  misc_feature (2)..(3): Phosphorothioate linkage
  modified_base (3)..(3): 2' O-methyl modified
  modified_base (4)..(4): 2' fluoro-modified
  modified_base (5)..(5): 2' O-methyl modified
  modified_base (6)..(6): 2' fluoro-modified
  modified_base (7)..(7): 2' O-methyl modified
  modified_base (8)..(8): 2' fluoro-modified
  modified_base (9)..(9): 2' O-methyl modified
  modified_base (10)..(10): 2' fluoro-modified
  modified_base (11)..(11): 2' O-methyl modified
  modified_base (12)..(12): 2' O-methyl modified
  modified_base (13)..(13): 2' O-methyl modified
  modified_base (14)..(14): 2' fluoro-modified
  modified_base (15)..(15): 2' O-methyl modified
  modified_base (16)..(16): 2' fluoro-modified
  modified_base (17)..(17): 2' O-methyl modified
  modified_base (18)..(18): 2' fluoro-modified
  modified_base (19)..(19): 2' O-methyl modified
  misc_feature (19)..(20): Phosphorothioate linkage
  modified_base (20)..(20): 2' O-methyl modified
  misc_feature (20)..(21): Phosphorothioate linkage
  modified_base (21)..(21): 2' O-methyl modified
uuuuauuccaagaacucuguu

SEQ ID NO: 14159 - RNA, 21 nt, Artificial Sequence
  Description of Artificial Sequence: Synthetic oligonucleotide
  modified_base (1)..(1): 2' O-methyl modified
  misc_feature (1)..(2): Phosphorothioate linkage
  modified_base (2)..(2): 2' fluoro-modified
  misc_feature (2)..(3): Phosphorothioate linkage
  modified_base (3)..(3): 2' O-methyl modified
  modified_base (4)..(4): 2' O-methyl modified
  modified_base (5)..(5): 2' O-methyl modified
  modified_base (6)..(6): 2' fluoro-modified
  modified_base (7)..(7): 2' O-methyl modified
  modified_base (8)..(8): 2' fluoro-modified
  modified_base (9)..(9): 2' fluoro-modified
  modified_base (10)..(10): 2' O-methyl modified
  modified_base (11)..(11): 2' O-methyl modified
  modified_base (12)..(12): 2' O-methyl modified
  modified_base (13)..(13): 2' O-methyl modified
  modified_base (14)..(14): 2' fluoro-modified
  modified_base (15)..(15): 2' O-methyl modified
  modified_base (16)..(16): 2' fluoro-modified
  modified_base (17)..(17): 2' O-methyl modified
  modified_base (18)..(18): 2' O-methyl modified
  modified_base (19)..(19): 2' O-methyl modified
  misc_feature (19)..(20): Phosphorothioate linkage
  modified_base (20)..(20): 2' O-methyl modified
  misc_feature (20)..(21): Phosphorothioate linkage
  modified_base (21)..(21): 2' O-methyl modified
uuuuauuccaagaacucuguu

SEQ ID NO: 14160 - RNA, 21 nt, Artificial Sequence
  Description of Artificial Sequence: Synthetic oligonucleotide
  modified_base (1)..(1): 2' O-methyl modified
  misc_feature (1)..(2): Phosphorothioate linkage
  modified_base (2)..(2): 2' fluoro-modified
  misc_feature (2)..(3): Phosphorothioate linkage
  modified_base (3)..(3): 2' O-methyl modified
  modified_base (4)..(4): 2' O-methyl modified
  modified_base (5)..(5): 2' O-methyl modified
  modified_base (6)..(6): 2' fluoro-modified
  modified_base (7)..(7): 2' O-methyl modified
  modified_base (8)..(8): 2' O-methyl modified
  modified_base (9)..(9): 2' O-methyl modified
  modified_base (10)..(10): 2' O-methyl modified
  modified_base (11)..(11): 2' O-methyl modified
  modified_base (12)..(12): 2' O-methyl modified
  modified_base (13)..(13): 2' O-methyl modified
  modified_base (14)..(14): 2' fluoro-modified
  modified_base (15)..(15): 2' O-methyl modified
  modified_base (16)..(16): 2' fluoro-modified
  modified_base (17)..(17): 2' O-methyl modified
  modified_base (18)..(18): 2' O-methyl modified
  modified_base (19)..(19): 2' O-methyl modified
  misc_feature (19)..(20): Phosphorothioate linkage
  modified_base (20)..(20): 2' O-methyl modified
  misc_feature (20)..(21): Phosphorothioate linkage
  modified_base (21)..(21): 2' O-methyl modified
uuuuauuccaagaacucuguu

SEQ ID NO: 14161 - RNA, 21 nt, Artificial Sequence
  Description of Artificial Sequence: Synthetic oligonucleotide
  modified_base (1)..(1): 2' O-methyl modified
  misc_feature (1)..(2): Phosphorothioate linkage
  modified_base (2)..(2): 2' fluoro-modified
  misc_feature (2)..(3): Phosphorothioate linkage
  modified_base (3)..(3): 2' O-methyl modified
  modified_base (4)..(4): 2' fluoro-modified
  modified_base (5)..(5): 2' O-methyl modified
  modified_base (6)..(6): 2' fluoro-modified
  modified_base (7)..(7): 2' O-methyl modified
  modified_base (8)..(8): 2' O-methyl modified
  modified_base (9)..(9): 2' O-methyl modified
  modified_base (10)..(10): 2' O-methyl modified
  modified_base (11)..(11): 2' O-methyl modified
  modified_base (12)..(12): 2' O-methyl modified
  modified_base (13)..(13): 2' O-methyl modified
  modified_base (14)..(14): 2' fluoro-modified
  modified_base (15)..(15): 2' O-methyl modified
  modified_base (16)..(16): 2' fluoro-modified
  modified_base (17)..(17): 2' O-methyl modified
  modified_base (18)..(18): 2' O-methyl modified
  modified_base (19)..(19): 2' O-methyl modified
  misc_feature (19)..(20): Phosphorothioate linkage
  modified_base (20)..(20): 2' O-methyl modified
  misc_feature (20)..(21): Phosphorothioate linkage
  modified_base (21)..(21): 2' O-methyl modified
uuuuauuccaagaacucuguu

SEQ ID NO: 14162 - RNA, 21 nt, Artificial Sequence
  Description of Artificial Sequence: Synthetic oligonucleotide
  modified_base (1)..(1): 2' O-methyl modified
  misc_feature (1)..(2): Phosphorothioate linkage
  modified_base (2)..(2): 2' fluoro-modified
  misc_feature (2)..(3): Phosphorothioate linkage
  modified_base (3)..(3): 2' O-methyl modified
  modified_base (4)..(4): 2' O-methyl modified
  modified_base (5)..(5): 2' O-methyl modified
  modified_base (6)..(6): 2' fluoro-modified
  modified_base (7)..(7): 2' O-methyl modified
  modified_base (8)..(8): 2' fluoro-modified
  modified_base (9)..(9): 2' O-methyl modified
  modified_base (10)..(10): 2' O-methyl modified
  modified_base (11)..(11): 2' O-methyl modified
  modified_base (12)..(12): 2' O-methyl modified
  modified_base (13)..(13): 2' O-methyl modified
  modified_base (14)..(14): 2' fluoro-modified
  modified_base (15)..(15): 2' O-methyl modified
  modified_base (16)..(16): 2' fluoro-modified
  modified_base (17)..(17): 2' O-methyl modified
  modified_base (18)..(18): 2' O-methyl modified
  modified_base (19)..(19): 2' O-methyl modified
  misc_feature (19)..(20): Phosphorothioate linkage
  modified_base (20)..(20): 2' O-methyl modified
  misc_feature (20)..(21): Phosphorothioate linkage
  modified_base (21)..(21): 2' O-methyl modified
uuuuauuccaagaacucuguu

SEQ ID NO: 14163 - RNA, 21 nt, Artificial Sequence
  Description of Artificial Sequence: Synthetic oligonucleotide
  modified_base (1)..(1): 2' O-methyl modified
  misc_feature (1)..(2): Phosphorothioate linkage
  modified_base (2)..(2): 2' fluoro-modified
  misc_feature (2)..(3): Phosphorothioate linkage
  modified_base (3)..(3): 2' O-methyl modified
  modified_base (4)..(4): 2' fluoro-modified
  modified_base (5)..(5): 2' O-methyl modified
  modified_base (6)..(6): 2' fluoro-modified
  modified_base (7)..(7): 2' O-methyl modified
  modified_base (8)..(8): 2' fluoro-modified
  modified_base (9)..(9): 2' O-methyl modified
  modified_base (10)..(10): 2' fluoro-modified
  modified_base (11)..(11): 2' O-methyl modified
  modified_base (12)..(12): 2' fluoro-modified
  modified_base (13)..(13): 2' O-methyl modified
  modified_base (14)..(14): 2' fluoro-modified
  modified_base (15)..(15): 2' O-methyl modified
  modified_base (16)..(16): 2' fluoro-modified
  modified_base (17)..(17): 2' O-methyl modified
  modified_base (18)..(18): 2' fluoro-modified
  modified_base (19)..(19): 2' O-methyl modified
  misc_feature (19)..(20): Phosphorothioate linkage
  modified_base (20)..(20): 2' O-methyl modified
  misc_feature (20)..(21): Phosphorothioate linkage
  modified_base (21)..(21): 2' O-methyl modified
uuuuauuccaagaacucuguu

SEQ ID NO: 14164 - RNA, 21 nt, Artificial Sequence
  Description of Artificial Sequence: Synthetic oligonucleotide
  modified_base (1)..(1): 2' O-methyl modified
  misc_feature (1)..(2): Phosphorothioate linkage
  modified_base (2)..(2): 2' fluoro-modified
  misc_feature (2)..(3): Phosphorothioate linkage
  modified_base (3)..(3): 2' O-methyl modified
  modified_base (4)..(4): 2' fluoro-modified
  modified_base (5)..(5): 2' O-methyl modified
  modified_base (6)..(6): 2' fluoro-modified
  modified_base (7)..(7): 2' O-methyl modified
  modified_base (8)..(8): 2' fluoro-modified
  modified_base (9)..(9): 2' fluoro-modified
  modified_base (10)..(10): 2' O-methyl modified
  modified_base (11)..(11): 2' O-methyl modified
  modified_base (12)..(12): 2' O-methyl modified
  modified_base (13)..(13): 2' O-methyl modified
  modified_base (14)..(14): 2' fluoro-modified
  modified_base (15)..(15): 2' O-methyl modified
  modified_base (16)..(16): 2' fluoro-modified
  modified_base (17)..(17): 2' O-methyl modified
  modified_base (18)..(18): 2' O-methyl modified
  modified_base (19)..(19): 2' O-methyl modified
  misc_feature (19)..(20): Phosphorothioate linkage
  modified_base (20)..(20): 2' O-methyl modified
  misc_feature (20)..(21): Phosphorothioate linkage
  modified_base (21)..(21): 2' O-methyl modified
uuuuauuccaagaacucuguu

SEQ ID NO: 14165 - RNA, 21 nt, Artificial Sequence
  Description of Artificial Sequence: Synthetic oligonucleotide
  modified_base (1)..(1): 2' O-methyl modified
  misc_feature (1)..(2): Phosphorothioate linkage
  modified_base (2)..(2): 2' fluoro-modified
  misc_feature (2)..(3): Phosphorothioate linkage
  modified_base (3)..(3): 2' O-methyl modified
  modified_base (4)..(4): 2' O-methyl modified
  modified_base (5)..(5): 2' O-methyl modified
  modified_base (6)..(6): 2' O-methyl modified
  modified_base (7)..(7): 2' O-methyl modified
  modified_base (8)..(8): 2' O-methyl modified
  modified_base (9)..(9): 2' O-methyl modified
  modified_base (10)..(10): 2' O-methyl modified
  modified_base (11)..(11): 2' O-methyl modified
  modified_base (12)..(12): 2' O-methyl modified
  modified_base (13)..(13): 2' O-methyl modified
  modified_base (14)..(14): 2' fluoro-modified
  modified_base (15)..(15): 2' O-methyl modified
  modified_base (16)..(16): 2' O-methyl modified
  modified_base (17)..(17): 2' O-methyl modified
  modified_base (18)..(18): 2' O-methyl modified
  modified_base (19)..(19): 2' O-methyl modified
  misc_feature (19)..(20): Phosphorothioate linkage
  modified_base (20)..(20): 2' O-methyl modified
  misc_feature (20)..(21): Phosphorothioate linkage
  modified_base (21)..(21): 2' O-methyl modified
uuuuauuccaagaacucuguu

SEQ ID NO: 14166 - RNA, 21 nt, Artificial Sequence
  Description of Artificial Sequence: Synthetic oligonucleotide
  modified_base (1)..(1): 2' O-methyl modified
  misc_feature (1)..(2): Phosphorothioate linkage
  modified_base (2)..(2): 2' fluoro-modified
  misc_feature (2)..(3): Phosphorothioate linkage
  modified_base (3)..(3): 2' O-methyl modified
  modified_base (4)..(4): 2' O-methyl modified
  modified_base (5)..(5): 2' O-methyl modified
  modified_base (6)..(6): 2' fluoro-modified
  modified_base (7)..(7): 2' O-methyl modified
  modified_base (8)..(8): 2' O-methyl modified
  modified_base (9)..(9): 2' O-methyl modified
  modified_base (10)..(10): 2' O-methyl modified
  modified_base (11)..(11): 2' O-methyl modified
  modified_base (12)..(12): 2' O-methyl modified
  modified_base (13)..(13): 2' O-methyl modified
  modified_base (14)..(14): 2' fluoro-modified
  modified_base (15)..(15): 2' O-methyl modified
  modified_base (16)..(16): 2' fluoro-modified
  modified_base (17)..(17): 2' O-methyl modified
  modified_base (18)..(18): 2' fluoro-modified
  modified_base (19)..(19): 2' O-methyl modified
  misc_feature (19)..(20): Phosphorothioate linkage
  modified_base (20)..(20): 2' O-methyl modified
  misc_feature (20)..(21): Phosphorothioate linkage
  modified_base (21)..(21): 2' O-methyl modified
uuuuauuccaagaacucuguu

SEQ ID NO: 14167 - RNA, 21 nt, Artificial Sequence
  Description of Artificial Sequence: Synthetic oligonucleotide
  modified_base (1)..(1): 2' O-methyl modified
  misc_feature (1)..(2): Phosphorothioate linkage
  modified_base (2)..(2): 2' fluoro-modified
  misc_feature (2)..(3): Phosphorothioate linkage
  modified_base (3)..(3): 2' O-methyl modified
  modified_base (4)..(4): 2' fluoro-modified
  modified_base (5)..(5): 2' O-methyl modified
  modified_base (6)..(6): 2' fluoro-modified
  modified_base (7)..(7): 2' O-methyl modified
  modified_base (8)..(8): 2' fluoro-modified
  modified_base (9)..(9): 2' O-methyl modified
  modified_base (10)..(10): 2' fluoro-modified
  modified_base (11)..(11): 2' O-methyl modified
  modified_base (12)..(12): 2' O-methyl modified
  modified_base (13)..(13): 2' O-methyl modified
  modified_base (14)..(14): 2' fluoro-modified
  modified_base (15)..(15): 2' O-methyl modified
  modified_base (16)..(16): 2' fluoro-modified
  modified_base (17)..(17): 2' O-methyl modified
  modified_base (18)..(18): 2' fluoro-modified
  modified_base (19)..(19): 2' O-methyl modified
  misc_feature (19)..(20): Phosphorothioate linkage
  modified_base (20)..(20): 2' O-methyl modified
  misc_feature (20)..(21): Phosphorothioate linkage
  modified_base (21)..(21): 2' O-methyl modified
uuggaaagaaucggaucacuu

SEQ ID NO: 14168 - RNA, 21 nt, Artificial Sequence
  Description of Artificial Sequence: Synthetic oligonucleotide
  modified_base (1)..(1): 2' O-methyl modified
  misc_feature (1)..(2): Phosphorothioate linkage
  modified_base (2)..(2): 2' fluoro-modified
  misc_feature (2)..(3): Phosphorothioate linkage
  modified_base (3)..(3): 2' O-methyl modified
  modified_base (4)..(4): 2' fluoro-modified
  modified_base (5)..(5): 2' O-methyl modified
  modified_base (6)..(6): 2' fluoro-modified
  modified_base (7)..(7): 2' O-methyl modified
  modified_base (8)..(8): 2' fluoro-modified
  modified_base (9)..(9): 2' O-methyl modified
  modified_base (10)..(10): 2' fluoro-modified
  modified_base (11)..(11): 2' O-methyl modified
  modified_base (12)..(12): 2' O-methyl modified
  modified_base (13)..(13): 2' O-methyl modified
  modified_base (14)..(14): 2' fluoro-modified
  modified_base (15)..(15): 2' O-methyl modified
  modified_base (16)..(16): 2' fluoro-modified
  modified_base (17)..(17): 2' O-methyl modified
  modified_base (18)..(18): 2' fluoro-modified
  modified_base (19)..(19): 2' O-methyl modified
  misc_feature (19)..(20): Phosphorothioate linkage
  modified_base (20)..(20): 2' O-methyl modified
  misc_feature (20)..(21): Phosphorothioate linkage
  modified_base (21)..(21): 2' O-methyl modified
ucuggaaagaaucggaucauu

SEQ ID NO: 14169 - RNA, 21 nt, Artificial Sequence
  Description of Artificial Sequence: Synthetic oligonucleotide
  modified_base (1)..(1): 2' O-methyl modified
  misc_feature (1)..(2): Phosphorothioate linkage
  modified_base (2)..(2): 2' fluoro-modified
  misc_feature (2)..(3): Phosphorothioate linkage
  modified_base (3)..(3): 2' O-methyl modified
  modified_base (4)..(4): 2' fluoro-modified
  modified_base (5)..(5): 2' O-methyl modified
  modified_base (6)..(6): 2' fluoro-modified
  modified_base (7)..(7): 2' O-methyl modified
  modified_base (8)..(8): 2' fluoro-modified
  modified_base (9)..(9): 2' O-methyl modified
  modified_base (10)..(10): 2' fluoro-modified
  modified_base (11)..(11): 2' O-methyl modified
  modified_base (12)..(12): 2' O-methyl modified
  modified_base (13)..(13): 2' O-methyl modified
  modified_base (14)..(14): 2' fluoro-modified
  modified_base (15)..(15): 2' O-methyl modified
  modified_base (16)..(16): 2' fluoro-modified
  modified_base (17)..(17): 2' O-methyl modified
  modified_base (18)..(18): 2' fluoro-modified
  modified_base (19)..(19): 2' O-methyl modified
  misc_feature (19)..(20): Phosphorothioate linkage
  modified_base (20)..(20): 2' O-methyl modified
  misc_feature (20)..(21): Phosphorothioate linkage
  modified_base (21)..(21): 2' O-methyl modified
ugcuggaaagaaucggaucuu

SEQ ID NO: 14170 - RNA, 21 nt, Artificial Sequence
  Description of Artificial Sequence: Synthetic oligonucleotide
  modified_base (1)..(1): 2' O-methyl modified
  misc_feature (1)..(2): Phosphorothioate linkage
  modified_base (2)..(2): 2' fluoro-modified
  misc_feature (2)..(3): Phosphorothioate linkage
  modified_base (3)..(3): 2' O-methyl modified
  modified_base (4)..(4): 2' fluoro-modified
  modified_base (5)..(5): 2' O-methyl modified
  modified_base (6)..(6): 2' fluoro-modified
  modified_base (7)..(7): 2' O-methyl modified
  modified_base (8)..(8): 2' fluoro-modified
  modified_base (9)..(9): 2' O-methyl modified
  modified_base (10)..(10): 2' fluoro-modified
  modified_base (11)..(11): 2' O-methyl modified
  modified_base (12)..(12): 2' O-methyl modified
  modified_base (13)..(13): 2' O-methyl modified
  modified_base (14)..(14): 2' fluoro-modified
  modified_base (15)..(15): 2' O-methyl modified
  modified_base (16)..(16): 2' fluoro-modified
  modified_base (17)..(17): 2' O-methyl modified
  modified_base (18)..(18): 2' fluoro-modified
  modified_base (19)..(19): 2' O-methyl modified
  misc_feature (19)..(20): Phosphorothioate linkage
  modified_base (20)..(20): 2' O-methyl modified
  misc_feature (20)..(21): Phosphorothioate linkage
  modified_base (21)..(21): 2' O-methyl modified
ucgcuggaaagaaucggauuu

SEQ ID NO: 14171 - RNA, 21 nt, Artificial Sequence
  Description of Artificial Sequence: Synthetic oligonucleotide
  modified_base (1)..(1): 2' O-methyl modified
  misc_feature (1)..(2): Phosphorothioate linkage
  modified_base (2)..(2): 2' fluoro-modified
  misc_feature (2)..(3): Phosphorothioate linkage
  modified_base (3)..(3): 2' O-methyl modified
  modified_base (4)..(4): 2' fluoro-modified
  modified_base (5)..(5): 2' O-methyl modified
  modified_base (6)..(6): 2' fluoro-modified
  modified_base (7)..(7): 2' O-methyl modified
  modified_base (8)..(8): 2' fluoro-modified
  modified_base (9)..(9): 2' O-methyl modified
  modified_base (10)..(10): 2' fluoro-modified
  modified_base (11)..(11): 2' O-methyl modified
  modified_base (12)..(12): 2' O-methyl modified
  modified_base (13)..(13): 2' O-methyl modified
  modified_base (14)..(14): 2' fluoro-modified
  modified_base (15)..(15): 2' O-methyl modified
  modified_base (16)..(16): 2' fluoro-modified
  modified_base (17)..(17): 2' O-methyl modified
  modified_base (18)..(18): 2' fluoro-modified
  modified_base (19)..(19): 2' O-methyl modified
  misc_feature (19)..(20): Phosphorothioate linkage
  modified_base (20)..(20): 2' O-methyl modified
  misc_feature (20)..(21): Phosphorothioate linkage
  modified_base (21)..(21): 2' O-methyl modified
uacccgcuugguugcagaauu

SEQ ID NO: 14172 - RNA, 21 nt, Artificial Sequence
  Description of Artificial Sequence: Synthetic oligonucleotide
  modified_base (1)..(1): 2' O-methyl modified
  misc_feature (1)..(2): Phosphorothioate linkage
  modified_base (2)..(2): 2' fluoro-modified
  misc_feature (2)..(3): Phosphorothioate linkage
  modified_base (3)..(3): 2' O-methyl modified
  modified_base (4)..(4): 2' fluoro-modified
  modified_base (5)..(5): 2' O-methyl modified
  modified_base (6)..(6): 2' fluoro-modified
  modified_base (7)..(7): 2' O-methyl modified
  modified_base (8)..(8): 2' fluoro-modified
  modified_base (9)..(9): 2' O-methyl modified
  modified_base (10)..(10): 2' fluoro-modified
  modified_base (11)..(11): 2' O-methyl modified
  modified_base (12)..(12): 2' O-methyl modified
  modified_base (13)..(13): 2' O-methyl modified
  modified_base (14)..(14): 2' fluoro-modified
  modified_base (15)..(15): 2' O-methyl modified
  modified_base (16)..(16): 2' fluoro-modified
  modified_base (17)..(17): 2' O-methyl modified
  modified_base (18)..(18): 2' fluoro-modified
  modified_base (19)..(19): 2' O-methyl modified
  misc_feature (19)..(20): Phosphorothioate linkage
  modified_base (20)..(20): 2' O-methyl modified
  misc_feature (20)..(21): Phosphorothioate linkage
  modified_base (21)..(21): 2' O-methyl modified
uggggacucucggggacguuu

SEQ ID NO: 14173 - RNA, 21 nt, Artificial Sequence
  Description of Artificial Sequence: Synthetic oligonucleotide
  modified_base (1)..(1): 2' O-methyl modified
  misc_feature (1)..(2): Phosphorothioate linkage
  modified_base (2)..(2): 2' fluoro-modified
  misc_feature (2)..(3): Phosphorothioate linkage
  modified_base (3)..(3): 2' O-methyl modified
  modified_base (4)..(4): 2' fluoro-modified
  modified_base (5)..(5): 2' O-methyl modified
  modified_base (6)..(6): 2' fluoro-modified
  modified_base (7)..(7): 2' O-methyl modified
  modified_base (8)..(8): 2' fluoro-modified
  modified_base (9)..(9): 2' O-methyl modified
  modified_base (10)..(10): 2' fluoro-modified
  modified_base (11)..(11): 2' O-methyl modified
  modified_base (12)..(12): 2' O-methyl modified
  modified_base (13)..(13): 2' O-methyl modified
  modified_base (14)..(14): 2' fluoro-modified
  modified_base (15)..(15): 2' O-methyl modified
  modified_base (16)..(16): 2' fluoro-modified
  modified_base (17)..(17): 2' O-methyl modified
  modified_base (18)..(18): 2' fluoro-modified
  modified_base (19)..(19): 2' O-methyl modified
  misc_feature (19)..(20): Phosphorothioate linkage
  modified_base (20)..(20): 2' O-methyl modified
  misc_feature (20)..(21): Phosphorothioate linkage
  modified_base (21)..(21): 2' O-methyl modified
uaucucgucccaggacgcauu

SEQ ID NO: 14174 - RNA, 21 nt, Artificial Sequence
  Description of Artificial Sequence: Synthetic oligonucleotide
  modified_base (1)..(1): 2' O-methyl modified
  misc_feature (1)..(2): Phosphorothioate linkage
  modified_base (2)..(2): 2' fluoro-modified
  misc_feature (2)..(3): Phosphorothioate linkage
  modified_base (3)..(3): 2' O-methyl modified
  modified_base (4)..(4): 2' fluoro-modified
  modified_base (5)..(5): 2' O-methyl modified
  modified_base (6)..(6): 2' fluoro-modified
  modified_base (7)..(7): 2' O-methyl modified
  modified_base (8)..(8): 2' fluoro-modified
  modified_base (9)..(9): 2' O-methyl modified
  modified_base (10)..(10): 2' fluoro-modified
  modified_base (11)..(11): 2' O-methyl modified
  modified_base (12)..(12): 2' O-methyl modified
  modified_base (13)..(13): 2' O-methyl modified
  modified_base (14)..(14): 2' fluoro-modified
  modified_base (15)..(15): 2' O-methyl modified
  modified_base (16)..(16): 2' fluoro-modified
  modified_base (17)..(17): 2' O-methyl modified
  modified_base (18)..(18): 2' fluoro-modified
  modified_base (19)..(19): 2' O-methyl modified
  misc_feature (19)..(20): Phosphorothioate linkage
  modified_base (20)..(20): 2' O-methyl modified
  misc_feature (20)..(21): Phosphorothioate linkage
  modified_base (21)..(21): 2' O-methyl modified
uggacauucaucucgucccuu

SEQ ID NO: 14175 - RNA, 21 nt, Artificial Sequence
  Description of Artificial Sequence: Synthetic oligonucleotide
  modified_base (1)..(1): 2' O-methyl modified
  misc_feature (1)..(2): Phosphorothioate linkage
  modified_base (2)..(2): 2' fluoro-modified
  misc_feature (2)..(3): Phosphorothioate linkage
  modified_base (3)..(3): 2' O-methyl modified
  modified_base (4)..(4): 2' fluoro-modified
  modified_base (5)..(5): 2' O-methyl modified
  modified_base (6)..(6): 2' fluoro-modified
  modified_base (7)..(7): 2' O-methyl modified
  modified_base (8)..(8): 2' fluoro-modified
  modified_base (9)..(9): 2' O-methyl modified
  modified_base (10)..(10): 2' fluoro-modified
  modified_base (11)..(11): 2' O-methyl modified
  modified_base (12)..(12): 2' O-methyl modified
  modified_base (13)..(13): 2' O-methyl modified
  modified_base (14)..(14): 2' fluoro-modified
  modified_base (15)..(15): 2' O-methyl modified
  modified_base (16)..(16): 2' fluoro-modified
  modified_base (17)..(17): 2' O-methyl modified
  modified_base (18)..(18): 2' fluoro-modified
  modified_base (19)..(19): 2' O-methyl modified
  misc_feature (19)..(20): Phosphorothioate linkage
  modified_base (20)..(20): 2' O-methyl modified
  misc_feature (20)..(21): Phosphorothioate linkage
  modified_base (21)..(21): 2' O-methyl modified
ucaggacauucaucucgucuu

SEQ ID NO: 14176 - RNA, 21 nt, Artificial Sequence
  Description of Artificial Sequence: Synthetic oligonucleotide
  modified_base (1)..(1): 2' O-methyl modified
  misc_feature (1)..(2): Phosphorothioate linkage
  modified_base (2)..(2): 2' fluoro-modified
  misc_feature (2)..(3): Phosphorothioate linkage
  modified_base (3)..(3): 2' O-methyl modified
  modified_base (4)..(4): 2' fluoro-modified
  modified_base (5)..(5): 2' O-methyl modified
  modified_base (6)..(6): 2' fluoro-modified
  modified_base (7)..(7): 2' O-methyl modified
  modified_base (8)..(8): 2' fluoro-modified
  modified_base (9)..(9): 2' O-methyl modified
  modified_base (10)..(10): 2' fluoro-modified
  modified_base (11)..(11): 2' O-methyl modified
  modified_base (12)..(12): 2' O-methyl modified
  modified_base (13)..(13): 2' O-methyl modified
  modified_base (14)..(14): 2' fluoro-modified
  modified_base (15)..(15): 2' O-methyl modified
  modified_base (16)..(16): 2' fluoro-modified
  modified_base (17)..(17): 2' O-methyl modified
  modified_base (18)..(18): 2' fluoro-modified
  modified_base (19)..(19): 2' O-methyl modified
  misc_feature (19)..(20): Phosphorothioate linkage
  modified_base (20)..(20): 2' O-methyl modified
  misc_feature (20)..(21): Phosphorothioate linkage
  modified_base (21)..(21): 2' O-methyl modified
ucgugcgccaggacauucauu

SEQ ID NO: 14177 - RNA, 21 nt, Artificial Sequence
  Description of Artificial Sequence: Synthetic oligonucleotide
  modified_base (1)..(1): 2' O-methyl modified
  misc_feature (1)..(2): Phosphorothioate linkage
  modified_base (2)..(2): 2' fluoro-modified
  misc_feature (2)..(3): Phosphorothioate linkage
  modified_base (3)..(3): 2' O-methyl modified
  modified_base (4)..(4): 2' fluoro-modified
  modified_base (5)..(5): 2' O-methyl modified
  modified_base (6)..(6): 2' fluoro-modified
  modified_base (7)..(7): 2' O-methyl modified
  modified_base (8)..(8): 2' fluoro-modified
  modified_base (9)..(9): 2' O-methyl modified
  modified_base (10)..(10): 2' fluoro-modified
  modified_base (11)..(11): 2' O-methyl modified
  modified_base (12)..(12): 2' O-methyl modified
  modified_base (13)..(13): 2' O-methyl modified
  modified_base (14)..(14): 2' fluoro-modified
  modified_base (15)..(15): 2' O-methyl modified
  modified_base (16)..(16): 2' fluoro-modified
  modified_base (17)..(17): 2' O-methyl modified
  modified_base (18)..(18): 2' fluoro-modified
  modified_base (19)..(19): 2' O-methyl modified
  misc_feature (19)..(20): Phosphorothioate linkage
  modified_base (20)..(20): 2' O-methyl modified
  misc_feature (20)..(21): Phosphorothioate linkage
  modified_base (21)..(21): 2' O-methyl modified
uccgugcgccaggacauucuu

SEQ ID NO: 14178 - RNA, 21 nt, Artificial Sequence
  Description of Artificial Sequence: Synthetic oligonucleotide
  modified_base (1)..(1): 2' O-methyl modified
  misc_feature (1)..(2): Phosphorothioate linkage
  modified_base (2)..(2): 2' fluoro-modified
  misc_feature (2)..(3): Phosphorothioate linkage
  modified_base (3)..(3): 2' O-methyl modified
  modified_base (4)..(4): 2' fluoro-modified
  modified_base (5)..(5): 2' O-methyl modified
  modified_base (6)..(6): 2' fluoro-modified
  modified_base (7)..(7): 2' O-methyl modified
  modified_base (8)..(8): 2' fluoro-modified
  modified_base (9)..(9): 2' O-methyl modified
  modified_base (10)..(10): 2' fluoro-modified
  modified_base (11)..(11): 2' O-methyl modified
  modified_base (12)..(12): 2' O-methyl modified
  modified_base (13)..(13): 2' O-methyl modified
  modified_base (14)..(14): 2' fluoro-modified
  modified_base (15)..(15): 2' O-methyl modified
  modified_base (16)..(16): 2' fluoro-modified
  modified_base (17)..(17): 2' O-methyl modified
  modified_base (18)..(18): 2' fluoro-modified
  modified_base (19)..(19): 2' O-methyl modified
  misc_feature (19)..(20): Phosphorothioate linkage
  modified_base (20)..(20): 2' O-methyl modified
  misc_feature (20)..(21): Phosphorothioate linkage
  modified_base (21)..(21): 2' O-methyl modified
uuccgugcgccaggacauuuu

SEQ ID NO: 14179 - RNA, 21 nt, Artificial Sequence
  Description of Artificial Sequence: Synthetic oligonucleotide
  modified_base (1)..(1): 2' O-methyl modified
  misc_feature (1)..(2): Phosphorothioate linkage
  modified_base (2)..(2): 2' fluoro-modified
  misc_feature (2)..(3): Phosphorothioate linkage
  modified_base (3)..(3): 2' O-methyl modified
  modified_base (4)..(4): 2' fluoro-modified
  modified_base (5)..(5): 2' O-methyl modified
  modified_base (6)..(6): 2' fluoro-modified
  modified_base (7)..(7): 2' O-methyl modified
  modified_base (8)..(8): 2' fluoro-modified
  modified_base (9)..(9): 2' O-methyl modified
  modified_base (10)..(10): 2' fluoro-modified
  modified_base (11)..(11): 2' O-methyl modified
  modified_base (12)..(12): 2' O-methyl modified
  modified_base (13)..(13): 2' O-methyl modified
  modified_base (14)..(14): 2' fluoro-modified
  modified_base (15)..(15): 2' O-methyl modified
  modified_base (16)..(16): 2' fluoro-modified
  modified_base (17)..(17): 2' O-methyl modified
  modified_base (18)..(18): 2' fluoro-modified
  modified_base (19)..(19): 2' O-methyl modified
  misc_feature (19)..(20): Phosphorothioate linkage
  modified_base (20)..(20): 2' O-methyl modified
  misc_feature (20)..(21): Phosphorothioate linkage
  modified_base (21)..(21): 2' O-methyl modified
uguccgugcgccaggacauuu

SEQ ID NO: 14180 - RNA, 21 nt, Artificial Sequence
  Description of Artificial Sequence: Synthetic oligonucleotide
  modified_base (1)..(1): 2' O-methyl modified
  misc_feature (1)..(2): Phosphorothioate linkage
  modified_base (2)..(2): 2' fluoro-modified
  misc_feature (2)..(3): Phosphorothioate linkage
  modified_base (3)..(3): 2' O-methyl modified
  modified_base (4)..(4): 2' fluoro-modified
  modified_base (5)..(5): 2' O-methyl modified
  modified_base (6)..(6): 2' fluoro-modified
  modified_base (7)..(7): 2' O-methyl modified
  modified_base (8)..(8): 2' fluoro-modified
  modified_base (9)..(9): 2' O-methyl modified
  modified_base (10)..(10): 2' fluoro-modified
  modified_base (11)..(11): 2' O-methyl modified
  modified_base (12)..(12): 2' O-methyl modified
  modified_base (13)..(13): 2' O-methyl modified
  modified_base (14)..(14): 2' fluoro-modified
  modified_base (15)..(15): 2' O-methyl modified
  modified_base (16)..(16): 2' fluoro-modified
  modified_base (17)..(17): 2' O-methyl modified
  modified_base (18)..(18): 2' fluoro-modified
  modified_base (19)..(19): 2' O-methyl modified
  misc_feature (19)..(20): Phosphorothioate linkage
  modified_base (20)..(20): 2' O-methyl modified
  misc_feature (20)..(21): Phosphorothioate linkage
  modified_base (21)..(21): 2' O-methyl modified
uaguccgugcgccaggacauu

SEQ ID NO: 14181 - RNA, 21 nt, Artificial Sequence
  Description of Artificial Sequence: Synthetic oligonucleotide
  modified_base (1)..(1): 2' O-methyl modified
  misc_feature (1)..(2): Phosphorothioate linkage
  modified_base (2)..(2): 2' fluoro-modified
  misc_feature (2)..(3): Phosphorothioate linkage
  modified_base (3)..(3): 2' O-methyl modified
  modified_base (4)..(4): 2' fluoro-modified
  modified_base (5)..(5): 2' O-methyl modified
  modified_base (6)..(6): 2' fluoro-modified
  modified_base (7)..(7): 2' O-methyl modified
  modified_base (8)..(8): 2' fluoro-modified
  modified_base (9)..(9): 2' O-methyl modified
  modified_base (10)..(10): 2' fluoro-modified
  modified_base (11)..(11): 2' O-methyl modified
  modified_base (12)..(12): 2' O-methyl modified
  modified_base (13)..(13): 2' O-methyl modified
  modified_base (14)..(14): 2' fluoro-modified
  modified_base (15)..(15): 2' O-methyl modified
  modified_base (16)..(16): 2' fluoro-modified
  modified_base (17)..(17): 2' O-methyl modified
  modified_base (18)..(18): 2' fluoro-modified
  modified_base (19)..(19): 2' O-methyl modified
  misc_feature (19)..(20): Phosphorothioate linkage
  modified_base (20)..(20): 2' O-methyl modified
  misc_feature (20)..(21): Phosphorothioate linkage
  modified_base (21)..(21): 2' O-methyl modified
uuucgcgcagccccuggccuu

SEQ ID NO: 14182 - RNA, 21 nt, Artificial Sequence
  Description of Artificial Sequence: Synthetic oligonucleotide
  modified_base (1)..(1): 2' O-methyl modified
  misc_feature (1)..(2): Phosphorothioate linkage
  modified_base (2)..(2): 2' fluoro-modified
  misc_feature (2)..(3): Phosphorothioate linkage
  modified_base (3)..(3): 2' O-methyl modified
  modified_base (4)..(4): 2' fluoro-modified
  modified_base (5)..(5): 2' O-methyl modified
  modified_base (6)..(6): 2' fluoro-modified
  modified_base (7)..(7): 2' O-methyl modified
  modified_base (8)..(8): 2' fluoro-modified
  modified_base (9)..(9): 2' O-methyl modified
  modified_base (10)..(10): 2' fluoro-modified
  modified_base (11)..(11): 2' O-methyl modified
  modified_base (12)..(12): 2' O-methyl modified
  modified_base (13)..(13): 2' O-methyl modified
  modified_base (14)..(14): 2' fluoro-modified
  modified_base (15)..(15): 2' O-methyl modified
  modified_base (16)..(16): 2' fluoro-modified
  modified_base (17)..(17): 2' O-methyl modified
  modified_base (18)..(18): 2' fluoro-modified
  modified_base (19)..(19): 2' O-methyl modified
  misc_feature (19)..(20): Phosphorothioate linkage
  modified_base (20)..(20): 2' O-methyl modified
  misc_feature (20)..(21): Phosphorothioate linkage
  modified_base (21)..(21): 2' O-methyl modified
uuguucgcgcagccccugguu

SEQ ID NO: 14183 - RNA, 21 nt, Artificial Sequence
  Description of Artificial Sequence: Synthetic oligonucleotide
  modified_base (1)..(1): 2' O-methyl modified
  misc_feature (1)..(2): Phosphorothioate linkage
  modified_base (2)..(2): 2' fluoro-modified
  misc_feature (2)..(3): Phosphorothioate linkage
  modified_base (3)..(3): 2' O-methyl modified
  modified_base (4)..(4): 2' fluoro-modified
  modified_base (5)..(5): 2' O-methyl modified
  modified_base (6)..(6): 2' fluoro-modified
  modified_base (7)..(7): 2' O-methyl modified
  modified_base (8)..(8): 2' fluoro-modified
  modified_base (9)..(9): 2' O-methyl modified
  modified_base (10)..(10): 2' fluoro-modified
  modified_base (11)..(11): 2' O-methyl modified
  modified_base (12)..(12): 2' O-methyl modified
  modified_base (13)..(13): 2' O-methyl modified
  modified_base (14)..(14): 2' fluoro-modified
  modified_base (15)..(15): 2' O-methyl modified
  modified_base (16)..(16): 2' fluoro-modified
  modified_base (17)..(17): 2' O-methyl modified
  modified_base (18)..(18): 2' fluoro-modified
  modified_base (19)..(19): 2' O-methyl modified
  misc_feature (19)..(20): Phosphorothioate linkage
  modified_base (20)..(20): 2' O-methyl modified
  misc_feature (20)..(21): Phosphorothioate linkage
  modified_base (21)..(21): 2' O-methyl modified
ugcguguucgcgcagccccuu

SEQ ID NO: 14184 - RNA, 21 nt, Artificial Sequence
  Description of Artificial Sequence: Synthetic oligonucleotide
  modified_base (1)..(1): 2' O-methyl modified
  misc_feature (1)..(2): Phosphorothioate linkage
  modified_base (2)..(2): 2' fluoro-modified
  misc_feature (2)..(3): Phosphorothioate linkage
  modified_base (3)..(3): 2' O-methyl modified
  modified_base (4)..(4): 2' fluoro-modified
  modified_base (5)..(5): 2' O-methyl modified
  modified_base (6)..(6): 2' fluoro-modified
  modified_base (7)..(7): 2' O-methyl modified
  modified_base (8)..(8): 2' fluoro-modified
  modified_base (9)..(9): 2' O-methyl modified
  modified_base (10)..(10): 2' fluoro-modified
  modified_base (11)..(11): 2' O-methyl modified
  modified_base (12)..(12): 2' O-methyl modified
  modified_base (13)..(13): 2' O-methyl modified
  modified_base (14)..(14): 2' fluoro-modified
  modified_base (15)..(15): 2' O-methyl modified
  modified_base (16)..(16): 2' fluoro-modified
  modified_base (17)..(17): 2' O-methyl modified
  modified_base (18)..(18): 2' fluoro-modified
  modified_base (19)..(19): 2' O-methyl modified
  misc_feature (19)..(20): Phosphorothioate linkage
  modified_base (20)..(20): 2' O-methyl modified
  misc_feature (20)..(21): Phosphorothioate linkage
  modified_base (21)..(21): 2' O-methyl modified
uccgcguguucgcgcagccuu

SEQ ID NO: 14185 - RNA, 21 nt, Artificial Sequence
  Description of Artificial Sequence: Synthetic oligonucleotide
  modified_base (1)..(1): 2' O-methyl modified
  misc_feature (1)..(2): Phosphorothioate linkage
  modified_base (2)..(2): 2' fluoro-modified
  misc_feature (2)..(3): Phosphorothioate linkage
  modified_base (3)..(3): 2' O-methyl modified
  modified_base (4)..(4): 2' fluoro-modified
  modified_base (5)..(5): 2' O-methyl modified
  modified_base (6)..(6): 2' fluoro-modified
  modified_base (7)..(7): 2' O-methyl modified
  modified_base (8)..(8): 2' fluoro-modified
  modified_base (9)..(9): 2' O-methyl modified
  modified_base (10)..(10): 2' fluoro-modified
  modified_base (11)..(11): 2' O-methyl modified
  modified_base (12)..(12): 2' O-methyl modified
  modified_base (13)..(13): 2' O-methyl modified
  modified_base (14)..(14): 2' fluoro-modified
  modified_base (15)..(15): 2' O-methyl modified
  modified_base (16)..(16): 2' fluoro-modified
  modified_base (17)..(17): 2' O-methyl modified
  modified_base (18)..(18): 2' fluoro-modified
  modified_base (19)..(19): 2' O-methyl modified
  misc_feature (19)..(20): Phosphorothioate linkage
  modified_base (20)..(20): 2' O-methyl modified
  misc_feature (20)..(21): Phosphorothioate linkage
  modified_base (21)..(21): 2' O-methyl modified
uuccgcguguucgcgcagcuu

SEQ ID NO: 14186 - RNA, 21 nt, Artificial Sequence
  Description of Artificial Sequence: Synthetic oligonucleotide
  modified_base (1)..(1): 2' O-methyl modified
  misc_feature (1)..(2): Phosphorothioate linkage
  modified_base (2)..(2): 2' fluoro-modified
  misc_feature (2)..(3): Phosphorothioate linkage
  modified_base (3)..(3): 2' O-methyl modified
  modified_base (4)..(4): 2' fluoro-modified
  modified_base (5)..(5): 2' O-methyl modified
  modified_base (6)..(6): 2' fluoro-modified
  modified_base (7)..(7): 2' O-methyl modified
  modified_base (8)..(8): 2' fluoro-modified
  modified_base (9)..(9): 2' O-methyl modified
  modified_base (10)..(10): 2' fluoro-modified
  modified_base (11)..(11): 2' O-methyl modified
  modified_base (12)..(12): 2' O-methyl modified
  modified_base (13)..(13): 2' O-methyl modified
  modified_base (14)..(14): 2' fluoro-modified
  modified_base (15)..(15): 2' O-methyl modified
  modified_base (16)..(16): 2' fluoro-modified
  modified_base (17)..(17): 2' O-methyl modified
  modified_base (18)..(18): 2' fluoro-modified
  modified_base (19)..(19): 2' O-methyl modified
  misc_feature (19)..(20): Phosphorothioate linkage
  modified_base (20)..(20): 2' O-methyl modified
  misc_feature (20)..(21): Phosphorothioate linkage
  modified_base (21)..(21): 2' O-methyl modified
ucuccgcguguucgcgcaguu

SEQ ID NO: 14187 - RNA, 21 nt, Artificial Sequence
  Description of Artificial Sequence: Synthetic oligonucleotide
  modified_base (1)..(1): 2' O-methyl modified
  misc_feature (1)..(2): Phosphorothioate linkage
  modified_base (2)..(2): 2' fluoro-modified
  misc_feature (2)..(3): Phosphorothioate linkage
  modified_base (3)..(3): 2' O-methyl modified
  modified_base (4)..(4): 2' fluoro-modified
  modified_base (5)..(5): 2' O-methyl modified
  modified_base (6)..(6): 2' fluoro-modified
  modified_base (7)..(7): 2' O-methyl modified
  modified_base (8)..(8): 2' fluoro-modified
  modified_base (9)..(9): 2' O-methyl modified
  modified_base (10)..(10): 2' fluoro-modified
  modified_base (11)..(11): 2' O-methyl modified
  modified_base (12)..(12): 2' O-methyl modified
  modified_base (13)..(13): 2' O-methyl modified
  modified_base (14)..(14): 2' fluoro-modified
  modified_base (15)..(15): 2' O-methyl modified
  modified_base (16)..(16): 2' fluoro-modified
  modified_base (17)..(17): 2' O-methyl modified
  modified_base (18)..(18): 2' fluoro-modified
  modified_base (19)..(19): 2' O-methyl modified
  misc_feature (19)..(20): Phosphorothioate linkage
  modified_base (20)..(20): 2' O-methyl modified
  misc_feature (20)..(21): Phosphorothioate linkage
  modified_base (21)..(21): 2' O-methyl modified
ugcuccgcguguucgcgcauu

SEQ ID NO: 14188 - RNA, 21 nt, Artificial Sequence
  Description of Artificial Sequence: Synthetic oligonucleotide
  modified_base (1)..(1): 2' O-methyl modified
  misc_feature (1)..(2): Phosphorothioate linkage
  modified_base (2)..(2): 2' fluoro-modified
  misc_feature (2)..(3): Phosphorothioate linkage
  modified_base (3)..(3): 2' O-methyl modified
  modified_base (4)..(4): 2' fluoro-modified
  modified_base (5)..(5): 2' O-methyl modified
  modified_base (6)..(6): 2' fluoro-modified
  modified_base (7)..(7): 2' O-methyl modified
  modified_base (8)..(8): 2' fluoro-modified
  modified_base (9)..(9): 2' O-methyl modified
  modified_base (10)..(10): 2' fluoro-modified
  modified_base (11)..(11): 2' O-methyl modified
  modified_base (12)..(12): 2' O-methyl modified
  modified_base (13)..(13): 2' O-methyl modified
  modified_base (14)..(14): 2' fluoro-modified
  modified_base (15)..(15): 2' O-methyl modified
  modified_base (16)..(16): 2' fluoro-modified
  modified_base (17)..(17): 2' O-methyl modified
  modified_base (18)..(18): 2' fluoro-modified
  modified_base (19)..(19): 2' O-methyl modified
  misc_feature (19)..(20): Phosphorothioate linkage
  modified_base (20)..(20): 2' O-methyl modified
  misc_feature (20)..(21): Phosphorothioate linkage
  modified_base (21)..(21): 2' O-methyl modified
ucgcuccgcguguucgcgcuu

SEQ ID NO: 14189 - RNA, 21 nt, Artificial Sequence
  Description of Artificial Sequence: Synthetic oligonucleotide
  modified_base (1)..(1): 2' O-methyl modified
  misc_feature (1)..(2): Phosphorothioate linkage
  modified_base (2)..(2): 2' fluoro-modified
  misc_feature (2)..(3): Phosphorothioate linkage
  modified_base (3)..(3): 2' O-methyl modified
  modified_base (4)..(4): 2' fluoro-modified
  modified_base (5)..(5): 2' O-methyl modified
  modified_base (6)..(6): 2' fluoro-modified
  modified_base (7)..(7): 2' O-methyl modified
  modified_base (8)..(8): 2' fluoro-modified
  modified_base (9)..(9): 2' O-methyl modified
  modified_base (10)..(10): 2' fluoro-modified
  modified_base (11)..(11): 2' O-methyl modified
  modified_base (12)..(12): 2' O-methyl modified
  modified_base (13)..(13): 2' O-methyl modified
  modified_base (14)..(14): 2' fluoro-modified
  modified_base (15)..(15): 2' O-methyl modified
  modified_base (16)..(16): 2' fluoro-modified
  modified_base (17)..(17): 2' O-methyl modified
  modified_base (18)..(18): 2' fluoro-modified
  modified_base (19)..(19): 2' O-methyl modified
  misc_feature (19)..(20): Phosphorothioate linkage
  modified_base (20)..(20): 2' O-methyl modified
  misc_feature (20)..(21): Phosphorothioate linkage
  modified_base (21)..(21): 2' O-methyl modified
ugcgcuccgcguguucgcguu

SEQ ID NO: 14190 - RNA, 21 nt, Artificial Sequence
  Description of Artificial Sequence: Synthetic oligonucleotide
  modified_base (1)..(1): 2' O-methyl modified
  misc_feature (1)..(2): Phosphorothioate linkage
  modified_base (2)..(2): 2' fluoro-modified
  misc_feature (2)..(3): Phosphorothioate linkage
  modified_base (3)..(3): 2' O-methyl modified
  modified_base (4)..(4): 2' fluoro-modified
  modified_base (5)..(5): 2' O-methyl modified
  modified_base (6)..(6): 2' fluoro-modified
  modified_base (7)..(7): 2' O-methyl modified
  modified_base (8)..(8): 2' fluoro-modified
  modified_base (9)..(9): 2' O-methyl modified
  modified_base (10)..(10): 2' fluoro-modified
  modified_base (11)..(11): 2' O-methyl modified
  modified_base (12)..(12): 2' O-methyl modified
  modified_base (13)..(13): 2' O-methyl modified
  modified_base (14)..(14): 2' fluoro-modified
  modified_base (15)..(15): 2' O-methyl modified
  modified_base (16)..(16): 2' fluoro-modified
  modified_base (17)..(17): 2' O-methyl modified
  modified_base (18)..(18): 2' fluoro-modified
  modified_base (19)..(19): 2' O-methyl modified
  misc_feature (19)..(20): Phosphorothioate linkage
  modified_base (20)..(20): 2' O-methyl modified
  misc_feature (20)..(21): Phosphorothioate linkage
  modified_base (21)..(21): 2' O-methyl modified
uugcgcuccgcguguucgcuu

SEQ ID NO: 14191 - RNA, 21 nt, Artificial Sequence
  Description of Artificial Sequence: Synthetic oligonucleotide
  modified_base (1)..(1): 2' O-methyl modified
  misc_feature (1)..(2): Phosphorothioate linkage
  modified_base (2)..(2): 2' fluoro-modified
  misc_feature (2)..(3): Phosphorothioate linkage
  modified_base (3)..(3): 2' O-methyl modified
  modified_base (4)..(4): 2' fluoro-modified
  modified_base (5)..(5): 2' O-methyl modified
  modified_base (6)..(6): 2' fluoro-modified
  modified_base (7)..(7): 2' O-methyl modified
  modified_base (8)..(8): 2' fluoro-modified
  modified_base (9)..(9): 2' O-methyl modified
  modified_base (10)..(10): 2' fluoro-modified
  modified_base (11)..(11): 2' O-methyl modified
  modified_base (12)..(12): 2' O-methyl modified
  modified_base (13)..(13): 2' O-methyl modified
  modified_base (14)..(14): 2' fluoro-modified
  modified_base (15)..(15): 2' O-methyl modified
  modified_base (16)..(16): 2' fluoro-modified
  modified_base (17)..(17): 2' O-methyl modified
  modified_base (18)..(18): 2' fluoro-modified
  modified_base (19)..(19): 2' O-methyl modified
  misc_feature (19)..(20): Phosphorothioate linkage
  modified_base (20)..(20): 2' O-methyl modified
  misc_feature (20)..(21): Phosphorothioate linkage
  modified_base (21)..(21): 2' O-methyl modified
ugugcgcuccgcguguucguu

SEQ ID NO: 14192 - RNA, 21 nt, Artificial Sequence
  Description of Artificial Sequence: Synthetic oligonucleotide
  modified_base (1)..(1): 2' O-methyl modified
  misc_feature (1)..(2): Phosphorothioate linkage
  modified_base (2)..(2): 2' fluoro-modified
  misc_feature (2)..(3): Phosphorothioate linkage
  modified_base (3)..(3): 2' O-methyl modified
  modified_base (4)..(4): 2' fluoro-modified
  modified_base (5)..(5): 2' O-methyl modified
  modified_base (6)..(6): 2' fluoro-modified
  modified_base (7)..(7): 2' O-methyl modified
  modified_base (8)..(8): 2' fluoro-modified
  modified_base (9)..(9): 2' O-methyl modified
  modified_base (10)..(10): 2' fluoro-modified
  modified_base (11)..(11): 2' O-methyl modified
  modified_base (12)..(12): 2' O-methyl modified
  modified_base (13)..(13): 2' O-methyl modified
  modified_base (14)..(14): 2' fluoro-modified
  modified_base (15)..(15): 2' O-methyl modified
  modified_base (16)..(16): 2' fluoro-modified
  modified_base (17)..(17): 2' O-methyl modified
  modified_base (18)..(18): 2' fluoro-modified
  modified_base (19)..(19): 2' O-methyl modified
  misc_feature (19)..(20): Phosphorothioate linkage
  modified_base (20)..(20): 2' O-methyl modified
  misc_feature (20)..(21): Phosphorothioate linkage
  modified_base (21)..(21): 2' O-methyl modified
ugggugcgcuccgcguguuuu

SEQ ID NO: 14193 - RNA, 21 nt, Artificial Sequence
  Description of Artificial Sequence: Synthetic oligonucleotide
  modified_base (1)..(1): 2' O-methyl modified
  misc_feature (1)..(2): Phosphorothioate linkage
  modified_base (2)..(2): 2' fluoro-modified
  misc_feature (2)..(3): Phosphorothioate linkage
  modified_base (3)..(3): 2' O-methyl modified
  modified_base (4)..(4): 2' fluoro-modified
  modified_base (5)..(5): 2' O-methyl modified
  modified_base (6)..(6): 2' fluoro-modified
  modified_base (7)..(7): 2' O-methyl modified
  modified_base (8)..(8): 2' fluoro-modified
  modified_base (9)..(9): 2' O-methyl modified
  modified_base (10)..(10): 2' fluoro-modified
  modified_base (11)..(11): 2' O-methyl modified
  modified_base (12)..(12): 2' O-methyl modified
  modified_base (13)..(13): 2' O-methyl modified
  modified_base (14)..(14): 2' fluoro-modified
  modified_base (15)..(15): 2' O-methyl modified
  modified_base (16)..(16): 2' fluoro-modified
  modified_base (17)..(17): 2' O-methyl modified
  modified_base (18)..(18): 2' fluoro-modified
  modified_base (19)..(19): 2' O-methyl modified
  misc_feature (19)..(20): Phosphorothioate linkage
  modified_base (20)..(20): 2' O-methyl modified
  misc_feature (20)..(21): Phosphorothioate linkage
  modified_base (21)..(21): 2' O-methyl modified
ucgggugcgcuccgcguguuu

SEQ ID NO: 14194 - RNA, 21 nt, Artificial Sequence
  Description of Artificial Sequence: Synthetic oligonucleotide
  modified_base (1)..(1): 2' O-methyl modified
  misc_feature (1)..(2): Phosphorothioate linkage
  modified_base (2)..(2): 2' fluoro-modified
  misc_feature (2)..(3): Phosphorothioate linkage
  modified_base (3)..(3): 2' O-methyl modified
  modified_base (4)..(4): 2' fluoro-modified
  modified_base (5)..(5): 2' O-methyl modified
  modified_base (6)..(6): 2' fluoro-modified
  modified_base (7)..(7): 2' O-methyl modified
  modified_base (8)..(8): 2' fluoro-modified
  modified_base (9)..(9): 2' O-methyl modified
  modified_base (10)..(10): 2' fluoro-modified
  modified_base (11)..(11): 2' O-methyl modified
  modified_base (12)..(12): 2' O-methyl modified
  modified_base (13)..(13): 2' O-methyl modified
  modified_base (14)..(14): 2' fluoro-modified
  modified_base (15)..(15): 2' O-methyl modified
  modified_base (16)..(16): 2' fluoro-modified
  modified_base (17)..(17): 2' O-methyl modified
  modified_base (18)..(18): 2' fluoro-modified
  modified_base (19)..(19): 2' O-methyl modified
  misc_feature (19)..(20): Phosphorothioate linkage
  modified_base (20)..(20): 2' O-methyl modified
  misc_feature (20)..(21): Phosphorothioate linkage
  modified_base (21)..(21): 2' O-methyl modified
ugcgggugcgcuccgcguguu

SEQ ID NO: 14195 - RNA, 21 nt, Artificial Sequence
  Description of Artificial Sequence: Synthetic oligonucleotide
  modified_base (1)..(1): 2' O-methyl modified
  misc_feature (1)..(2): Phosphorothioate linkage
  modified_base (2)..(2): 2' fluoro-modified
  misc_feature (2)..(3): Phosphorothioate linkage
  modified_base (3)..(3): 2' O-methyl modified
  modified_base (4)..(4): 2' fluoro-modified
  modified_base (5)..(5): 2' O-methyl modified
  modified_base (6)..(6): 2' fluoro-modified
  modified_base (7)..(7): 2' O-methyl modified
  modified_base (8)..(8): 2' fluoro-modified
  modified_base (9)..(9): 2' O-methyl modified
  modified_base (10)..(10): 2' fluoro-modified
  modified_base (11)..(11): 2' O-methyl modified
  modified_base (12)..(12): 2' O-methyl modified
  modified_base (13)..(13): 2' O-methyl modified
  modified_base (14)..(14): 2' fluoro-modified
  modified_base (15)..(15): 2' O-methyl modified
  modified_base (16)..(16): 2' fluoro-modified
  modified_base (17)..(17): 2' O-methyl modified
  modified_base (18)..(18): 2' fluoro-modified
  modified_base (19)..(19): 2' O-methyl modified
  misc_feature (19)..(20): Phosphorothioate linkage
  modified_base (20)..(20): 2' O-methyl modified
  misc_feature (20)..(21): Phosphorothioate linkage
  modified_base (21)..(21): 2' O-methyl modified
uacugcgggugcgcuccgcuu

SEQ ID NO: 14196 - RNA, 21 nt, Artificial Sequence
  Description of Artificial Sequence: Synthetic oligonucleotide
  modified_base (1)..(1): 2' O-methyl modified
  misc_feature (1)..(2): Phosphorothioate linkage
  modified_base (2)..(2): 2' fluoro-modified
  misc_feature (2)..(3): Phosphorothioate linkage
  modified_base (3)..(3): 2' O-methyl modified
  modified_base (4)..(4): 2' fluoro-modified
  modified_base (5)..(5): 2' O-methyl modified
  modified_base (6)..(6): 2' fluoro-modified
  modified_base (7)..(7): 2' O-methyl modified
  modified_base (8)..(8): 2' fluoro-modified
  modified_base (9)..(9): 2' O-methyl modified
  modified_base (10)..(10): 2' fluoro-modified
  modified_base (11)..(11): 2' O-methyl modified
  modified_base (12)..(12): 2' O-methyl modified
  modified_base (13)..(13): 2' O-methyl modified
  modified_base (14)..(14): 2' fluoro-modified
  modified_base (15)..(15): 2' O-methyl modified
  modified_base (16)..(16): 2' fluoro-modified
  modified_base (17)..(17): 2' O-methyl modified
  modified_base (18)..(18): 2' fluoro-modified
  modified_base (19)..(19): 2' O-methyl modified
  misc_feature (19)..(20): Phosphorothioate linkage
  modified_base (20)..(20): 2' O-methyl modified
  misc_feature (20)..(21): Phosphorothioate linkage
  modified_base (21)..(21): 2' O-methyl modified
uagcugacugcgggugcgcuu

SEQ ID NO: 14197 - RNA, 21 nt, Artificial Sequence
  Description of Artificial Sequence: Synthetic oligonucleotide
  modified_base (1)..(1): 2' O-methyl modified
  misc_feature (1)..(2): Phosphorothioate linkage
  modified_base (2)..(2): 2' fluoro-modified
  misc_feature (2)..(3): Phosphorothioate linkage
  modified_base (3)..(3): 2' O-methyl modified
  modified_base (4)..(4): 2' fluoro-modified
  modified_base (5)..(5): 2' O-methyl modified
  modified_base (6)..(6): 2' fluoro-modified
  modified_base (7)..(7): 2' O-methyl modified
  modified_base (8)..(8): 2' fluoro-modified
  modified_base (9)..(9): 2' O-methyl modified
  modified_base (10)..(10): 2' fluoro-modified
  modified_base (11)..(11): 2' O-methyl modified
  modified_base (12)..(12): 2' O-methyl modified
  modified_base (13)..(13): 2' O-methyl modified
  modified_base (14)..(14): 2' fluoro-modified
  modified_base (15)..(15): 2' O-methyl modified
  modified_base (16)..(16): 2' fluoro-modified
  modified_base (17)..(17): 2' O-methyl modified
  modified_base (18)..(18): 2' fluoro-modified
  modified_base (19)..(19): 2' O-methyl modified
  misc_feature (19)..(20): Phosphorothioate linkage
  modified_base (20)..(20): 2' O-methyl modified
  misc_feature (20)..(21): Phosphorothioate linkage
  modified_base (21)..(21): 2' O-methyl modified
uucagcugacugcgggugcuu

SEQ ID NO: 14198 - RNA, 21 nt, Artificial Sequence
  Description of Artificial Sequence: Synthetic oligonucleotide
  modified_base (1)..(1): 2' O-methyl modified
  misc_feature (1)..(2): Phosphorothioate linkage
  modified_base (2)..(2): 2' fluoro-modified
  misc_feature (2)..(3): Phosphorothioate linkage
  modified_base (3)..(3): 2' O-methyl modified
  modified_base (4)..(4): 2' fluoro-modified
  modified_base (5)..(5): 2' O-methyl modified
  modified_base (6)..(6): 2' fluoro-modified
  modified_base (7)..(7): 2' O-methyl modified
  modified_base (8)..(8): 2' fluoro-modified
  modified_base (9)..(9): 2' O-methyl modified
  modified_base (10)..(10): 2' fluoro-modified
  modified_base (11)..(11): 2' O-methyl modified
  modified_base (12)..(12): 2' O-methyl modified
  modified_base (13)..(13): 2' O-methyl modified
  modified_base (14)..(14): 2' fluoro-modified
  modified_base (15)..(15): 2' O-methyl modified
  modified_base (16)..(16): 2' fluoro-modified
  modified_base (17)..(17): 2' O-methyl modified
  modified_base (18)..(18): 2' fluoro-modified
  modified_base (19)..(19): 2' O-methyl modified
  misc_feature (19)..(20): Phosphorothioate linkage
  modified_base (20)..(20): 2' O-methyl modified
  misc_feature (20)..(21): Phosphorothioate linkage
  modified_base (21)..(21): 2' O-methyl modified
ugguggaccccucgguuccuu

SEQ ID NO: 14199 - RNA, 21 nt, Artificial Sequence
  Description of Artificial Sequence: Synthetic oligonucleotide
  modified_base (1)..(1): 2' O-methyl modified
  misc_feature (1)..(2): Phosphorothioate linkage
  modified_base (2)..(2): 2' fluoro-modified
  misc_feature (2)..(3): Phosphorothioate linkage
  modified_base (3)..(3): 2' O-methyl modified
  modified_base (4)..(4): 2' fluoro-modified
  modified_base (5)..(5): 2' O-methyl modified
  modified_base (6)..(6): 2' fluoro-modified
  modified_base (7)..(7): 2' O-methyl modified
  modified_base (8)..(8): 2' fluoro-modified
  modified_base (9)..(9): 2' O-methyl modified
  modified_base (10)..(10): 2' fluoro-modified
  modified_base (11)..(11): 2' O-methyl modified
  modified_base (12)..(12): 2' O-methyl modified
  modified_base (13)..(13): 2' O-methyl modified
  modified_base (14)..(14): 2' fluoro-modified
  modified_base (15)..(15): 2' O-methyl modified
  modified_base (16)..(16): 2' fluoro-modified
  modified_base (17)..(17): 2' O-methyl modified
  modified_base (18)..(18): 2' fluoro-modified
  modified_base (19)..(19): 2' O-methyl modified
  misc_feature (19)..(20): Phosphorothioate linkage
  modified_base (20)..(20): 2' O-methyl modified
  misc_feature (20)..(21): Phosphorothioate linkage
  modified_base (21)..(21): 2' O-methyl modified
ucgguggaccccucgguucuu

SEQ ID NO: 14200 - RNA, 21 nt, Artificial Sequence
  Description of Artificial Sequence: Synthetic oligonucleotide
  modified_base (1)..(1): 2' O-methyl modified
  misc_feature (1)..(2): Phosphorothioate linkage
  modified_base (2)..(2): 2' fluoro-modified
  misc_feature (2)..(3): Phosphorothioate linkage
  modified_base (3)..(3): 2' O-methyl modified
  modified_base (4)..(4): 2' fluoro-modified
  modified_base (5)..(5): 2' O-methyl modified
  modified_base (6)..(6): 2' fluoro-modified
  modified_base (7)..(7): 2' O-methyl modified
  modified_base (8)..(8): 2' fluoro-modified
  modified_base (9)..(9): 2' O-methyl modified
  modified_base (10)..(10): 2' fluoro-modified
  modified_base (11)..(11): 2' O-methyl modified
  modified_base (12)..(12): 2' O-methyl modified
  modified_base (13)..(13): 2' O-methyl modified
  modified_base (14)..(14): 2' fluoro-modified
  modified_base (15)..(15): 2' O-methyl modified
  modified_base (16)..(16): 2' fluoro-modified
  modified_base (17)..(17): 2' O-methyl modified
  modified_base (18)..(18): 2' fluoro-modified
  modified_base (19)..(19): 2' O-methyl modified
  misc_feature (19)..(20): Phosphorothioate linkage
  modified_base (20)..(20): 2' O-methyl modified
  misc_feature (20)..(21): Phosphorothioate linkage
  modified_base (21)..(21): 2' O-methyl modified
ucaggggcuaacgggagguuu

SEQ ID NO: 14201 - RNA, 21 nt, Artificial Sequence
  Description of Artificial Sequence: Synthetic oligonucleotide
  modified_base (1)..(1): 2' O-methyl modified
  misc_feature (1)..(2): Phosphorothioate linkage
  modified_base (2)..(2): 2' fluoro-modified
  misc_feature (2)..(3): Phosphorothioate linkage
  modified_base (3)..(3): 2' O-methyl modified
  modified_base (4)..(4): 2' fluoro-modified
  modified_base (5)..(5): 2' O-methyl modified
  modified_base (6)..(6): 2' fluoro-modified
  modified_base (7)..(7): 2' O-methyl modified
  modified_base (8)..(8): 2' fluoro-modified
  modified_base (9)..(9): 2' O-methyl modified
  modified_base (10)..(10): 2' fluoro-modified
  modified_base (11)..(11): 2' O-methyl modified
  modified_base (12)..(12): 2' O-methyl modified
  modified_base (13)..(13): 2' O-methyl modified
  modified_base (14)..(14): 2' fluoro-modified
  modified_base (15)..(15): 2' O-methyl modified
  modified_base (16)..(16): 2' fluoro-modified
  modified_base (17)..(17): 2' O-methyl modified
  modified_base (18)..(18): 2' fluoro-modified
  modified_base (19)..(19): 2' O-methyl modified
  misc_feature (19)..(20): Phosphorothioate linkage
  modified_base (20)..(20): 2' O-methyl modified
  misc_feature (20)..(21): Phosphorothioate linkage
  modified_base (21)..(21): 2' O-methyl modified
uucaggggcuaacgggagguu

SEQ ID NO: 14202 - RNA, 21 nt, Artificial Sequence
  Description of Artificial Sequence: Synthetic oligonucleotide
  modified_base (1)..(1): 2' O-methyl modified
  misc_feature (1)..(2): Phosphorothioate linkage
  modified_base (2)..(2): 2' fluoro-modified
  misc_feature (2)..(3): Phosphorothioate linkage
  modified_base (3)..(3): 2' O-methyl modified
  modified_base (4)..(4): 2' fluoro-modified
  modified_base (5)..(5): 2' O-methyl modified
  modified_base (6)..(6): 2' fluoro-modified
  modified_base (7)..(7): 2' O-methyl modified
  modified_base (8)..(8): 2' fluoro-modified
  modified_base (9)..(9): 2' O-methyl modified
  modified_base (10)..(10): 2' fluoro-modified
  modified_base (11)..(11): 2' O-methyl modified
  modified_base (12)..(12): 2' O-methyl modified
  modified_base (13)..(13): 2' O-methyl modified
  modified_base (14)..(14): 2' fluoro-modified
  modified_base (15)..(15): 2' O-methyl modified
  modified_base (16)..(16): 2' fluoro-modified
  modified_base (17)..(17): 2' O-methyl modified
  modified_base (18)..(18): 2' fluoro-modified
  modified_base (19)..(19): 2' O-methyl modified
  misc_feature (19)..(20): Phosphorothioate linkage
  modified_base (20)..(20): 2' O-methyl modified
  misc_feature (20)..(21): Phosphorothioate linkage
  modified_base (21)..(21): 2' O-methyl modified
ugcucucaggggcuaacgguu

SEQ ID NO: 14203 - RNA, 21 nt, Artificial Sequence
  Description of Artificial Sequence: Synthetic oligonucleotide
  modified_base (1)..(1): 2' O-methyl modified
  misc_feature (1)..(2): Phosphorothioate linkage
  modified_base (2)..(2): 2' fluoro-modified
  misc_feature (2)..(3): Phosphorothioate linkage
  modified_base (3)..(3): 2' O-methyl modified
  modified_base (4)..(4): 2' fluoro-modified
  modified_base (5)..(5): 2' O-methyl modified
  modified_base (6)..(6): 2' fluoro-modified
  modified_base (7)..(7): 2' O-methyl modified
  modified_base (8)..(8): 2' fluoro-modified
  modified_base (9)..(9): 2' O-methyl modified
  modified_base (10)..(10): 2' fluoro-modified
  modified_base (11)..(11): 2' O-methyl modified
  modified_base (12)..(12): 2' O-methyl modified
  modified_base (13)..(13): 2' O-methyl modified
  modified_base (14)..(14): 2' fluoro-modified
  modified_base (15)..(15): 2' O-methyl modified
  modified_base (16)..(16): 2' fluoro-modified
  modified_base (17)..(17): 2' O-methyl modified
  modified_base (18)..(18): 2' fluoro-modified
  modified_base (19)..(19): 2' O-methyl modified
  misc_feature (19)..(20): Phosphorothioate linkage
  modified_base (20)..(20): 2' O-methyl modified
  misc_feature (20)..(21): Phosphorothioate linkage
  modified_base (21)..(21): 2' O-methyl modified
uccuugaguugugucugcauu

SEQ ID NO: 14204 - RNA, 21 nt, Artificial Sequence
  Description of Artificial Sequence: Synthetic oligonucleotide
  modified_base (1)..(1): 2' O-methyl modified
  misc_feature (1)..(2): Phosphorothioate linkage
  modified_base (2)..(2): 2' fluoro-modified
  misc_feature (2)..(3): Phosphorothioate linkage
  modified_base (3)..(3): 2' O-methyl modified
  modified_base (4)..(4): 2' fluoro-modified
  modified_base (5)..(5): 2' O-methyl modified
  modified_base (6)..(6): 2' fluoro-modified
  modified_base (7)..(7): 2' O-methyl modified
  modified_base (8)..(8): 2' fluoro-modified
  modified_base (9)..(9): 2' O-methyl modified
  modified_base (10)..(10): 2' fluoro-modified
  modified_base (11)..(11): 2' O-methyl modified
  modified_base (12)..(12): 2' O-methyl modified
  modified_base (13)..(13): 2' O-methyl modified
  modified_base (14)..(14): 2' fluoro-modified
  modified_base (15)..(15): 2' O-methyl modified
  modified_base (16)..(16): 2' fluoro-modified
  modified_base (17)..(17): 2' O-methyl modified
  modified_base (18)..(18): 2' fluoro-modified
  modified_base (19)..(19): 2' O-methyl modified
  misc_feature (19)..(20): Phosphorothioate linkage
  modified_base (20)..(20): 2' O-methyl modified
  misc_feature (20)..(21): Phosphorothioate linkage
  modified_base (21)..(21): 2' O-methyl modified
ugagccuugaguugugucuuu

SEQ ID NO: 14205 - RNA, 21 nt, Artificial Sequence
  Description of Artificial Sequence: Synthetic oligonucleotide
  modified_base (1)..(1): 2' O-methyl modified
  misc_feature (1)..(2): Phosphorothioate linkage
  modified_base (2)..(2): 2' fluoro-modified
  misc_feature (2)..(3): Phosphorothioate linkage
  modified_base (3)..(3): 2' O-methyl modified
  modified_base (4)..(4): 2' fluoro-modified
  modified_base (5)..(5): 2' O-methyl modified
  modified_base (6)..(6): 2' fluoro-modified
  modified_base (7)..(7): 2' O-methyl modified
  modified_base (8)..(8): 2' fluoro-modified
  modified_base (9)..(9): 2' O-methyl modified
  modified_base (10)..(10): 2' fluoro-modified
  modified_base (11)..(11): 2' O-methyl modified
  modified_base (12)..(12): 2' O-methyl modified
  modified_base (13)..(13): 2' O-methyl modified
  modified_base (14)..(14): 2' fluoro-modified
  modified_base (15)..(15): 2' O-methyl modified
  modified_base (16)..(16): 2' fluoro-modified
  modified_base (17)..(17): 2' O-methyl modified
  modified_base (18)..(18): 2' fluoro-modified
  modified_base (19)..(19): 2' O-methyl modified
  misc_feature (19)..(20): Phosphorothioate linkage
  modified_base (20)..(20): 2' O-methyl modified
  misc_feature (20)..(21): Phosphorothioate linkage
  modified_base (21)..(21): 2' O-methyl modified
uaagaguugcuggauccuguu

SEQ ID NO: 14206 - RNA, 21 nt, Artificial Sequence
  Description of Artificial Sequence: Synthetic oligonucleotide
  modified_base (1)..(1): 2' O-methyl modified
  misc_feature (1)..(2): Phosphorothioate linkage
  modified_base (2)..(2): 2' fluoro-modified
  misc_feature (2)..(3): Phosphorothioate linkage
  modified_base (3)..(3): 2' O-methyl modified
  modified_base (4)..(4): 2' fluoro-modified
  modified_base (5)..(5): 2' O-methyl modified
  modified_base (6)..(6): 2' fluoro-modified
  modified_base (7)..(7): 2' O-methyl modified
  modified_base (8)..(8): 2' fluoro-modified
  modified_base (9)..(9): 2' O-methyl modified
  modified_base (10)..(10): 2' fluoro-modified
  modified_base (11)..(11): 2' O-methyl modified
  modified_base (12)..(12): 2' O-methyl modified
  modified_base (13)..(13): 2' O-methyl modified
  modified_base (14)..(14): 2' fluoro-modified
  modified_base (15)..(15): 2' O-methyl modified
  modified_base (16)..(16): 2' fluoro-modified
  modified_base (17)..(17): 2' O-methyl modified
  modified_base (18)..(18): 2' fluoro-modified
  modified_base (19)..(19): 2' O-methyl modified
  misc_feature (19)..(20): Phosphorothioate linkage
  modified_base (20)..(20): 2' O-methyl modified
  misc_feature (20)..(21): Phosphorothioate linkage
  modified_base (21)..(21): 2' O-methyl modified
uccuuguggaagaguugcuuu

SEQ ID NO: 14207 - RNA, 21 nt, Artificial Sequence
  Description of Artificial Sequence: Synthetic oligonucleotide
  modified_base (1)..(1): 2' O-methyl modified
  misc_feature (1)..(2): Phosphorothioate linkage
  modified_base (2)..(2): 2' fluoro-modified
  misc_feature (2)..(3): Phosphorothioate linkage
  modified_base (3)..(3): 2' O-methyl modified
  modified_base (4)..(4): 2' fluoro-modified
  modified_base (5)..(5): 2' O-methyl modified
  modified_base (6)..(6): 2' fluoro-modified
  modified_base (7)..(7): 2' O-methyl modified
  modified_base (8)..(8): 2' fluoro-modified
  modified_base (9)..(9): 2' O-methyl modified
  modified_base (10)..(10): 2' fluoro-modified
  modified_base (11)..(11): 2' O-methyl modified
  modified_base (12)..(12): 2' O-methyl modified
  modified_base (13)..(13): 2' O-methyl modified
  modified_base (14)..(14): 2' fluoro-modified
  modified_base (15)..(15): 2' O-methyl modified
  modified_base (16)..(16): 2' fluoro-modified
  modified_base (17)..(17): 2' O-methyl modified
  modified_base (18)..(18): 2' fluoro-modified
  modified_base (19)..(19): 2' O-methyl modified
  misc_feature (19)..(20): Phosphorothioate linkage
  modified_base (20)..(20): 2' O-methyl modified
  misc_feature (20)..(21): Phosphorothioate linkage
  modified_base (21)..(21): 2' O-methyl modified
ucaccuuguggaagaguuguu

SEQ ID NO: 14208 - RNA, 21 nt, Artificial Sequence
  Description of Artificial Sequence: Synthetic oligonucleotide
  modified_base (1)..(1): 2' O-methyl modified
  misc_feature (1)..(2): Phosphorothioate linkage
  modified_base (2)..(2): 2' fluoro-modified
  misc_feature (2)..(3): Phosphorothioate linkage
  modified_base (3)..(3): 2' O-methyl modified
  modified_base (4)..(4): 2' fluoro-modified
  modified_base (5)..(5): 2' O-methyl modified
  modified_base (6)..(6): 2' fluoro-modified
  modified_base (7)..(7): 2' O-methyl modified
  modified_base (8)..(8): 2' fluoro-modified
  modified_base (9)..(9): 2' O-methyl modified
  modified_base (10)..(10): 2' fluoro-modified
  modified_base (11)..(11): 2' O-methyl modified
  modified_base (12)..(12): 2' O-methyl modified
  modified_base (13)..(13): 2' O-methyl modified
  modified_base (14)..(14): 2' fluoro-modified
  modified_base (15)..(15): 2' O-methyl modified
  modified_base (16)..(16): 2' fluoro-modified
  modified_base (17)..(17): 2' O-methyl modified
  modified_base (18)..(18): 2' fluoro-modified
  modified_base (19)..(19): 2' O-methyl modified
  misc_feature (19)..(20): Phosphorothioate linkage
  modified_base (20)..(20): 2' O-methyl modified
  misc_feature (20)..(21): Phosphorothioate linkage
  modified_base (21)..(21): 2' O-methyl modified
uccaccuuguggaagaguuuu

SEQ ID NO: 14209 - RNA, 21 nt, Artificial Sequence
  Description of Artificial Sequence: Synthetic oligonucleotide
  modified_base (1)..(1): 2' O-methyl modified
  misc_feature (1)..(2): Phosphorothioate linkage
  modified_base (2)..(2): 2' fluoro-modified
  misc_feature (2)..(3): Phosphorothioate linkage
  modified_base (3)..(3): 2' O-methyl modified
  modified_base (4)..(4): 2' fluoro-modified
  modified_base (5)..(5): 2' O-methyl modified
  modified_base (6)..(6): 2' fluoro-modified
  modified_base (7)..(7): 2' O-methyl modified
  modified_base (8)..(8): 2' fluoro-modified
  modified_base (9)..(9): 2' O-methyl modified
  modified_base (10)..(10): 2' fluoro-modified
  modified_base (11)..(11): 2' O-methyl modified
  modified_base (12)..(12): 2' O-methyl modified
  modified_base (13)..(13): 2' O-methyl modified
  modified_base (14)..(14): 2' fluoro-modified
  modified_base (15)..(15): 2' O-methyl modified
  modified_base (16)..(16): 2' fluoro-modified
  modified_base (17)..(17): 2' O-methyl modified
  modified_base (18)..(18): 2' fluoro-modified
  modified_base (19)..(19): 2' O-methyl modified
  misc_feature (19)..(20): Phosphorothioate linkage
  modified_base (20)..(20): 2' O-methyl modified
  misc_feature (20)..(21): Phosphorothioate linkage
  modified_base (21)..(21): 2' O-methyl modified
ugcugaauucgcaggugcuuu

SEQ ID NO: 14210 - RNA, 21 nt, Artificial Sequence
  Description of Artificial Sequence: Synthetic oligonucleotide
  modified_base (1)..(1): 2' O-methyl modified
  misc_feature (1)..(2): Phosphorothioate linkage
  modified_base (2)..(2): 2' fluoro-modified
  misc_feature (2)..(3): Phosphorothioate linkage
  modified_base (3)..(3): 2' O-methyl modified
  modified_base (4)..(4): 2' fluoro-modified
  modified_base (5)..(5): 2' O-methyl modified
  modified_base (6)..(6): 2' fluoro-modified
  modified_base (7)..(7): 2' O-methyl modified
  modified_base (8)..(8): 2' fluoro-modified
  modified_base (9)..(9): 2' O-methyl modified
  modified_base (10)..(10): 2' fluoro-modified
  modified_base (11)..(11): 2' O-methyl modified
  modified_base (12)..(12): 2' O-methyl modified
  modified_base (13)..(13): 2' O-methyl modified
  modified_base (14)..(14): 2' fluoro-modified
  modified_base (15)..(15): 2' O-methyl modified
  modified_base (16)..(16): 2' fluoro-modified
  modified_base (17)..(17): 2' O-methyl modified
  modified_base (18)..(18): 2' fluoro-modified
  modified_base (19)..(19): 2' O-methyl modified
  misc_feature (19)..(20): Phosphorothioate linkage
  modified_base (20)..(20): 2' O-methyl modified
  misc_feature (20)..(21): Phosphorothioate linkage
  modified_base (21)..(21): 2' O-methyl modified
ugccaccucauggucuagguu

SEQ ID NO: 14211 - RNA, 21 nt, Artificial Sequence
  Description of Artificial Sequence: Synthetic oligonucleotide
  modified_base (1)..(1): 2' O-methyl modified
  misc_feature (1)..(2): Phosphorothioate linkage
  modified_base (2)..(2): 2' fluoro-modified
  misc_feature (2)..(3): Phosphorothioate linkage
  modified_base (3)..(3): 2' O-methyl modified
  modified_base (4)..(4): 2' fluoro-modified
  modified_base (5)..(5): 2' O-methyl modified
  modified_base (6)..(6): 2' fluoro-modified
  modified_base (7)..(7): 2' O-methyl modified
  modified_base (8)..(8): 2' fluoro-modified
  modified_base (9)..(9): 2' O-methyl modified
  modified_base (10)..(10): 2' fluoro-modified
  modified_base (11)..(11): 2' O-methyl modified
  modified_base (12)..(12): 2' O-methyl modified
  modified_base (13)..(13): 2' O-methyl modified
  modified_base (14)..(14): 2' fluoro-modified
  modified_base (15)..(15): 2' O-methyl modified
  modified_base (16)..(16): 2' fluoro-modified
  modified_base (17)..(17): 2' O-methyl modified
  modified_base (18)..(18): 2' fluoro-modified
  modified_base (19)..(19): 2' O-methyl modified
  misc_feature (19)..(20): Phosphorothioate linkage
  modified_base (20)..(20): 2' O-methyl modified
  misc_feature (20)..(21): Phosphorothioate linkage
  modified_base (21)..(21): 2' O-methyl modified
ucuucgggcaggcuuggccuu

SEQ ID NO: 14212 - RNA, 21 nt, Artificial Sequence
  Description of Artificial Sequence: Synthetic oligonucleotide
  modified_base (1)..(1): 2' O-methyl modified
  misc_feature (1)..(2): Phosphorothioate linkage
  modified_base (2)..(2): 2' fluoro-modified
  misc_feature (2)..(3): Phosphorothioate linkage
  modified_base (3)..(3): 2' O-methyl modified
  modified_base (4)..(4): 2' fluoro-modified
  modified_base (5)..(5): 2' O-methyl modified
  modified_base (6)..(6): 2' fluoro-modified
  modified_base (7)..(7): 2' O-methyl modified
  modified_base (8)..(8): 2' fluoro-modified
  modified_base (9)..(9): 2' O-methyl modified
  modified_base (10)..(10): 2' fluoro-modified
  modified_base (11)..(11): 2' O-methyl modified
  modified_base (12)..(12): 2' O-methyl modified
  modified_base (13)..(13): 2' O-methyl modified
  modified_base (14)..(14): 2' fluoro-modified
  modified_base (15)..(15): 2' O-methyl modified
  modified_base (16)..(16): 2' fluoro-modified
  modified_base (17)..(17): 2' O-methyl modified
  modified_base (18)..(18): 2' fluoro-modified
  modified_base (19)..(19): 2' O-methyl modified
  misc_feature (19)..(20): Phosphorothioate linkage
  modified_base (20)..(20): 2' O-methyl modified
  misc_feature (20)..(21): Phosphorothioate linkage
  modified_base (21)..(21): 2' O-methyl modified
uuucuucgggcaggcuugguu

SEQ ID NO: 14213 - RNA, 21 nt, Artificial Sequence
  Description of Artificial Sequence: Synthetic oligonucleotide
  modified_base (1)..(1): 2' O-methyl modified
  misc_feature (1)..(2): Phosphorothioate linkage
  modified_base (2)..(2): 2' fluoro-modified
  misc_feature (2)..(3): Phosphorothioate linkage
  modified_base (3)..(3): 2' O-methyl modified
  modified_base (4)..(4): 2' fluoro-modified
  modified_base (5)..(5): 2' O-methyl modified
  modified_base (6)..(6): 2' fluoro-modified
  modified_base (7)..(7): 2' O-methyl modified
  modified_base (8)..(8): 2' fluoro-modified
  modified_base (9)..(9): 2' O-methyl modified
  modified_base (10)..(10): 2' fluoro-modified
  modified_base (11)..(11): 2' O-methyl modified
  modified_base (12)..(12): 2' O-methyl modified
  modified_base (13)..(13): 2' O-methyl modified
  modified_base (14)..(14): 2' fluoro-modified
  modified_base (15)..(15): 2' O-methyl modified
  modified_base (16)..(16): 2' fluoro-modified
  modified_base (17)..(17): 2' O-methyl modified
  modified_base (18)..(18): 2' fluoro-modified
  modified_base (19)..(19): 2' O-methyl modified
  misc_feature (19)..(20): Phosphorothioate linkage
  modified_base (20)..(20): 2' O-methyl modified
  misc_feature (20)..(21): Phosphorothioate linkage
  modified_base (21)..(21): 2' O-methyl modified
uucuuucuucgggcaggcuuu

SEQ ID NO: 14214 - RNA, 21 nt, Artificial Sequence
  Description of Artificial Sequence: Synthetic oligonucleotide
  modified_base (1)..(1): 2' O-methyl modified
  misc_feature (1)..(2): Phosphorothioate linkage
  modified_base (2)..(2): 2' fluoro-modified
  misc_feature (2)..(3): Phosphorothioate linkage
  modified_base (3)..(3): 2' O-methyl modified
  modified_base (4)..(4): 2' fluoro-modified
  modified_base (5)..(5): 2' O-methyl modified
  modified_base (6)..(6): 2' fluoro-modified
  modified_base (7)..(7): 2' O-methyl modified
  modified_base (8)..(8): 2' fluoro-modified
  modified_base (9)..(9): 2' O-methyl modified
  modified_base (10)..(10): 2' fluoro-modified
  modified_base (11)..(11): 2' O-methyl modified
  modified_base (12)..(12): 2' O-methyl modified
  modified_base (13)..(13): 2' O-methyl modified
  modified_base (14)..(14): 2' fluoro-modified
  modified_base (15)..(15): 2' O-methyl modified
  modified_base (16)..(16): 2' fluoro-modified
  modified_base (17)..(17): 2' O-methyl modified
  modified_base (18)..(18): 2' fluoro-modified
  modified_base (19)..(19): 2' O-methyl modified
  misc_feature (19)..(20): Phosphorothioate linkage
  modified_base (20)..(20): 2' O-methyl modified
  misc_feature (20)..(21): Phosphorothioate linkage
  modified_base (21)..(21): 2' O-methyl modified
uauuacuguccagccuccauu

SEQ ID NO: 14215 - RNA, 21 nt, Artificial Sequence
  Description of Artificial Sequence: Synthetic oligonucleotide
  modified_base (1)..(1): 2' O-methyl modified
  misc_feature (1)..(2): Phosphorothioate linkage
  modified_base (2)..(2): 2' fluoro-modified
  misc_feature (2)..(3): Phosphorothioate linkage
  modified_base (3)..(3): 2' O-methyl modified
  modified_base (4)..(4): 2' fluoro-modified
  modified_base (5)..(5): 2' O-methyl modified
  modified_base (6)..(6): 2' fluoro-modified
  modified_base (7)..(7): 2' O-methyl modified
  modified_base (8)..(8): 2' fluoro-modified
  modified_base (9)..(9): 2' O-methyl modified
  modified_base (10)..(10): 2' fluoro-modified
  modified_base (11)..(11): 2' O-methyl modified
  modified_base (12)..(12): 2' O-methyl modified
  modified_base (13)..(13): 2' O-methyl modified
  modified_base (14)..(14): 2' fluoro-modified
  modified_base (15)..(15): 2' O-methyl modified
  modified_base (16)..(16): 2' fluoro-modified
  modified_base (17)..(17): 2' O-methyl modified
  modified_base (18)..(18): 2' fluoro-modified
  modified_base (19)..(19): 2' O-methyl modified
  misc_feature (19)..(20): Phosphorothioate linkage
  modified_base (20)..(20): 2' O-methyl modified
  misc_feature (20)..(21): Phosphorothioate linkage
  modified_base (21)..(21): 2' O-methyl modified
ucugaauuacuguccagccuu

SEQ ID NO: 14216 - RNA, 21 nt, Artificial Sequence
  Description of Artificial Sequence: Synthetic oligonucleotide
  modified_base (1)..(1): 2' O-methyl modified
  misc_feature (1)..(2): Phosphorothioate linkage
  modified_base (2)..(2): 2' fluoro-modified
  misc_feature (2)..(3): Phosphorothioate linkage
  modified_base (3)..(3): 2' O-methyl modified
  modified_base (4)..(4): 2' fluoro-modified
  modified_base (5)..(5): 2' O-methyl modified
  modified_base (6)..(6): 2' fluoro-modified
  modified_base (7)..(7): 2' O-methyl modified
  modified_base (8)..(8): 2' fluoro-modified
  modified_base (9)..(9): 2' O-methyl modified
  modified_base (10)..(10): 2' fluoro-modified
  modified_base (11)..(11): 2' O-methyl modified
  modified_base (12)..(12): 2' O-methyl modified
  modified_base (13)..(13): 2' O-methyl modified
  modified_base (14)..(14): 2' fluoro-modified
  modified_base (15)..(15): 2' O-methyl modified
  modified_base (16)..(16): 2' fluoro-modified
  modified_base (17)..(17): 2' O-methyl modified
  modified_base (18)..(18): 2' fluoro-modified
  modified_base (19)..(19): 2' O-methyl modified
  misc_feature (19)..(20): Phosphorothioate linkage
  modified_base (20)..(20): 2' O-methyl modified
  misc_feature (20)..(21): Phosphorothioate linkage
  modified_base (21)..(21): 2' O-methyl modified
uggcgccucugaauuacuguu

SEQ ID NO: 14217 - RNA, 21 nt, Artificial Sequence
  Description of Artificial Sequence: Synthetic oligonucleotide
  modified_base (1)..(1): 2' O-methyl modified
  misc_feature (1)..(2): Phosphorothioate linkage
  modified_base (2)..(2): 2' fluoro-modified
  misc_feature (2)..(3): Phosphorothioate linkage
  modified_base (3)..(3): 2' O-methyl modified
  modified_base (4)..(4): 2' fluoro-modified
  modified_base (5)..(5): 2' O-methyl modified
  modified_base (6)..(6): 2' fluoro-modified
  modified_base (7)..(7): 2' O-methyl modified
  modified_base (8)..(8): 2' fluoro-modified
  modified_base (9)..(9): 2' O-methyl modified
  modified_base (10)..(10): 2' fluoro-modified
  modified_base (11)..(11): 2' O-methyl modified
  modified_base (12)..(12): 2' O-methyl modified
  modified_base (13)..(13): 2' O-methyl modified
  modified_base (14)..(14): 2' fluoro-modified
  modified_base (15)..(15): 2' O-methyl modified
  modified_base (16)..(16): 2' fluoro-modified
  modified_base (17)..(17): 2' O-methyl modified
  modified_base (18)..(18): 2' fluoro-modified
  modified_base (19)..(19): 2' O-methyl modified
  misc_feature (19)..(20): Phosphorothioate linkage
  modified_base (20)..(20): 2' O-methyl modified
  misc_feature (20)..(21): Phosphorothioate linkage
  modified_base (21)..(21): 2' O-methyl modified
uuggcgccucugaauuacuuu

SEQ ID NO: 14218 - RNA, 21 nt, Artificial Sequence
  Description of Artificial Sequence: Synthetic oligonucleotide
  modified_base (1)..(1): 2' O-methyl modified
  misc_feature (1)..(2): Phosphorothioate linkage
  modified_base (2)..(2): 2' fluoro-modified
  misc_feature (2)..(3): Phosphorothioate linkage
  modified_base (3)..(3): 2' O-methyl modified
  modified_base (4)..(4): 2' fluoro-modified
  modified_base (5)..(5): 2' O-methyl modified
  modified_base (6)..(6): 2' fluoro-modified
  modified_base (7)..(7): 2' O-methyl modified
  modified_base (8)..(8): 2' fluoro-modified
  modified_base (9)..(9): 2' O-methyl modified
  modified_base (10)..(10): 2' fluoro-modified
  modified_base (11)..(11): 2' O-methyl modified
  modified_base (12)..(12): 2' O-methyl modified
  modified_base (13)..(13): 2' O-methyl modified
  modified_base (14)..(14): 2' fluoro-modified
  modified_base (15)..(15): 2' O-methyl modified
  modified_base (16)..(16): 2' fluoro-modified
  modified_base (17)..(17): 2' O-methyl modified
  modified_base (18)..(18): 2' fluoro-modified
  modified_base (19)..(19): 2' O-methyl modified
  misc_feature (19)..(20): Phosphorothioate linkage
  modified_base (20)..(20): 2' O-methyl modified
  misc_feature (20)..(21): Phosphorothioate linkage
  modified_base (21)..(21): 2' O-methyl modified
uguggcgccucugaauuacuu

SEQ ID NO: 14219 - RNA, 21 nt, Artificial Sequence
  Description of Artificial Sequence: Synthetic oligonucleotide
  modified_base (1)..(1): 2' O-methyl modified
  misc_feature (1)..(2): Phosphorothioate linkage
  modified_base (2)..(2): 2' fluoro-modified
  misc_feature (2)..(3): Phosphorothioate linkage
  modified_base (3)..(3): 2' O-methyl modified
  modified_base (4)..(4): 2' fluoro-modified
  modified_base (5)..(5): 2' O-methyl modified
  modified_base (6)..(6): 2' fluoro-modified
  modified_base (7)..(7): 2' O-methyl modified
  modified_base (8)..(8): 2' fluoro-modified
  modified_base (9)..(9): 2' O-methyl modified
  modified_base (10)..(10): 2' fluoro-modified
  modified_base (11)..(11): 2' O-methyl modified
  modified_base (12)..(12): 2' O-methyl modified
  modified_base (13)..(13): 2' O-methyl modified
  modified_base (14)..(14): 2' fluoro-modified
  modified_base (15)..(15): 2' O-methyl modified
  modified_base (16)..(16): 2' fluoro-modified
  modified_base (17)..(17): 2' O-methyl modified
  modified_base (18)..(18): 2' fluoro-modified
  modified_base (19)..(19): 2' O-methyl modified
  misc_feature (19)..(20): Phosphorothioate linkage
  modified_base (20)..(20): 2' O-methyl modified
  misc_feature (20)..(21): Phosphorothioate linkage
  modified_base (21)..(21): 2' O-methyl modified
ucguggcgccucugaauuauu

SEQ ID NO: 14220 - RNA, 21 nt, Artificial Sequence
  Description of Artificial Sequence: Synthetic oligonucleotide
  modified_base (1)..(1): 2' O-methyl modified
  misc_feature (1)..(2): Phosphorothioate linkage
  modified_base (2)..(2): 2' fluoro-modified
  misc_feature (2)..(3): Phosphorothioate linkage
  modified_base (3)..(3): 2' O-methyl modified
  modified_base (4)..(4): 2' fluoro-modified
  modified_base (5)..(5): 2' O-methyl modified
  modified_base (6)..(6): 2' fluoro-modified
  modified_base (7)..(7): 2' O-methyl modified
  modified_base (8)..(8): 2' fluoro-modified
  modified_base (9)..(9): 2' O-methyl modified
  modified_base (10)..(10): 2' fluoro-modified
  modified_base (11)..(11): 2' O-methyl modified
  modified_base (12)..(12): 2' O-methyl modified
  modified_base (13)..(13): 2' O-methyl modified
  modified_base (14)..(14): 2' fluoro-modified
  modified_base (15)..(15): 2' O-methyl modified
  modified_base (16)..(16): 2' fluoro-modified
  modified_base (17)..(17): 2' O-methyl modified
  modified_base (18)..(18): 2' fluoro-modified
  modified_base (19)..(19): 2' O-methyl modified
  misc_feature (19)..(20): Phosphorothioate linkage
  modified_base (20)..(20): 2' O-methyl modified
  misc_feature (20)..(21): Phosphorothioate linkage
  modified_base (21)..(21): 2' O-methyl modified
uagccaucguggcgccucuuu

SEQ ID NO: 14221 - RNA, 21 nt, Artificial Sequence
  Description of Artificial Sequence: Synthetic oligonucleotide
  modified_base (1)..(1): 2' O-methyl modified
  misc_feature (1)..(2): Phosphorothioate linkage
  modified_base (2)..(2): 2' fluoro-modified
  misc_feature (2)..(3): Phosphorothioate linkage
  modified_base (3)..(3): 2' O-methyl modified
  modified_base (4)..(4): 2' fluoro-modified
  modified_base (5)..(5): 2' O-methyl modified
  modified_base (6)..(6): 2' fluoro-modified
  modified_base (7)..(7): 2' O-methyl modified
  modified_base (8)..(8): 2' fluoro-modified
  modified_base (9)..(9): 2' O-methyl modified
  modified_base (10)..(10): 2' fluoro-modified
  modified_base (11)..(11): 2' O-methyl modified
  modified_base (12)..(12): 2' O-methyl modified
  modified_base (13)..(13): 2' O-methyl modified
  modified_base (14)..(14): 2' fluoro-modified
  modified_base (15)..(15): 2' O-methyl modified
  modified_base (16)..(16): 2' fluoro-modified
  modified_base (17)..(17): 2' O-methyl modified
  modified_base (18)..(18): 2' fluoro-modified
  modified_base (19)..(19): 2' O-methyl modified
  misc_feature (19)..(20): Phosphorothioate linkage
  modified_base (20)..(20): 2' O-methyl modified
  misc_feature (20)..(21): Phosphorothioate linkage
  modified_base (21)..(21): 2' O-methyl modified
uagggccgguugaaguccauu

SEQ ID NO: 14222 - RNA, 21 nt, Artificial Sequence
  Description of Artificial Sequence: Synthetic oligonucleotide
  modified_base (1)..(1): 2' O-methyl modified
  misc_feature (1)..(2): Phosphorothioate linkage
  modified_base (2)..(2): 2' fluoro-modified
  misc_feature (2)..(3): Phosphorothioate linkage
  modified_base (3)..(3): 2' O-methyl modified
  modified_base (4)..(4): 2' fluoro-modified
  modified_base (5)..(5): 2' O-methyl modified
  modified_base (6)..(6): 2' fluoro-modified
  modified_base (7)..(7): 2' O-methyl modified
  modified_base (8)..(8): 2' fluoro-modified
  modified_base (9)..(9): 2' O-methyl modified
  modified_base (10)..(10): 2' fluoro-modified
  modified_base (11)..(11): 2' O-methyl modified
  modified_base (12)..(12): 2' O-methyl modified
  modified_base (13)..(13): 2' O-methyl modified
  modified_base (14)..(14): 2' fluoro-modified
  modified_base (15)..(15): 2' O-methyl modified
  modified_base (16)..(16): 2' fluoro-modified
  modified_base (17)..(17): 2' O-methyl modified
  modified_base (18)..(18): 2' fluoro-modified
  modified_base (19)..(19): 2' O-methyl modified
  misc_feature (19)..(20): Phosphorothioate linkage
  modified_base (20)..(20): 2' O-methyl modified
  misc_feature (20)..(21): Phosphorothioate linkage
  modified_base (21)..(21): 2' O-methyl modified
ucagggccgguugaaguccuu

SEQ ID NO: 14223 - RNA, 21 nt, Artificial Sequence
  Description of Artificial Sequence: Synthetic oligonucleotide
  modified_base (1)..(1): 2' O-methyl modified
  misc_feature (1)..(2): Phosphorothioate linkage
  modified_base (2)..(2): 2' fluoro-modified
  misc_feature (2)..(3): Phosphorothioate linkage
  modified_base (3)..(3): 2' O-methyl modified
  modified_base (4)..(4): 2' fluoro-modified
  modified_base (5)..(5): 2' O-methyl modified
  modified_base (6)..(6): 2' fluoro-modified
  modified_base (7)..(7): 2' O-methyl modified
  modified_base (8)..(8): 2' fluoro-modified
  modified_base (9)..(9): 2' O-methyl modified
  modified_base (10)..(10): 2' fluoro-modified
  modified_base (11)..(11): 2' O-methyl modified
  modified_base (12)..(12): 2' O-methyl modified
  modified_base (13)..(13): 2' O-methyl modified
  modified_base (14)..(14): 2' fluoro-modified
  modified_base (15)..(15): 2' O-methyl modified
  modified_base (16)..(16): 2' fluoro-modified
  modified_base (17)..(17): 2' O-methyl modified
  modified_base (18)..(18): 2' fluoro-modified
  modified_base (19)..(19): 2' O-methyl modified
  misc_feature (19)..(20): Phosphorothioate linkage
  modified_base (20)..(20): 2' O-methyl modified
  misc_feature (20)..(21): Phosphorothioate linkage
  modified_base (21)..(21): 2' O-methyl modified
uuucccagggccgguugaauu

SEQ ID NO: 14224 - RNA, 21 nt, Artificial Sequence
  Description of Artificial Sequence: Synthetic oligonucleotide
  modified_base (1)..(1): 2' O-methyl modified
  misc_feature (1)..(2): Phosphorothioate linkage
  modified_base (2)..(2): 2' fluoro-modified
  misc_feature (2)..(3): Phosphorothioate linkage
  modified_base (3)..(3): 2' O-methyl modified
  modified_base (4)..(4): 2' fluoro-modified
  modified_base (5)..(5): 2' O-methyl modified
  modified_base (6)..(6): 2' fluoro-modified
  modified_base (7)..(7): 2' O-methyl modified
  modified_base (8)..(8): 2' fluoro-modified
  modified_base (9)..(9): 2' O-methyl modified
  modified_base (10)..(10): 2' fluoro-modified
  modified_base (11)..(11): 2' O-methyl modified
  modified_base (12)..(12): 2' O-methyl modified
  modified_base (13)..(13): 2' O-methyl modified
  modified_base (14)..(14): 2' fluoro-modified
  modified_base (15)..(15): 2' O-methyl modified
  modified_base (16)..(16): 2' fluoro-modified
  modified_base (17)..(17): 2' O-methyl modified
  modified_base (18)..(18): 2' fluoro-modified
  modified_base (19)..(19): 2' O-methyl modified
  misc_feature (19)..(20): Phosphorothioate linkage
  modified_base (20)..(20): 2' O-methyl modified
  misc_feature (20)..(21): Phosphorothioate linkage
  modified_base (21)..(21): 2' O-methyl modified
ugccuuguaggcuucccaguu

SEQ ID NO: 14225 - RNA, 21 nt, Artificial Sequence
  Description of Artificial Sequence: Synthetic oligonucleotide
  modified_base (1)..(1): 2' O-methyl modified
  misc_feature (1)..(2): Phosphorothioate linkage
  modified_base (2)..(2): 2' fluoro-modified
  misc_feature (2)..(3): Phosphorothioate linkage
  modified_base (3)..(3): 2' O-methyl modified
  modified_base (4)..(4): 2' fluoro-modified
  modified_base (5)..(5): 2' O-methyl modified
  modified_base (6)..(6): 2' fluoro-modified
  modified_base (7)..(7): 2' O-methyl modified
  modified_base (8)..(8): 2' fluoro-modified
  modified_base (9)..(9): 2' O-methyl modified
  modified_base (10)..(10): 2' fluoro-modified
  modified_base (11)..(11): 2' O-methyl modified
  modified_base (12)..(12): 2' O-methyl modified
  modified_base (13)..(13): 2' O-methyl modified
  modified_base (14)..(14): 2' fluoro-modified
  modified_base (15)..(15): 2' O-methyl modified
  modified_base (16)..(16): 2' fluoro-modified
  modified_base (17)..(17): 2' O-methyl modified
  modified_base (18)..(18): 2' fluoro-modified
  modified_base (19)..(19): 2' O-methyl modified
  misc_feature (19)..(20): Phosphorothioate linkage
  modified_base (20)..(20): 2' O-methyl modified
  misc_feature (20)..(21): Phosphorothioate linkage
  modified_base (21)..(21): 2' O-methyl modified
ucgccuuguaggcuucccauu

SEQ ID NO: 14226 - RNA, 21 nt, Artificial Sequence
  Description of Artificial Sequence: Synthetic oligonucleotide
  modified_base (1)..(1): 2' O-methyl modified
  misc_feature (1)..(2): Phosphorothioate linkage
  modified_base (2)..(2): 2' fluoro-modified
  misc_feature (2)..(3): Phosphorothioate linkage
  modified_base (3)..(3): 2' O-methyl modified
  modified_base (4)..(4): 2' fluoro-modified
  modified_base (5)..(5): 2' O-methyl modified
  modified_base (6)..(6): 2' fluoro-modified
  modified_base (7)..(7): 2' O-methyl modified
  modified_base (8)..(8): 2' fluoro-modified
  modified_base (9)..(9): 2' O-methyl modified
  modified_base (10)..(10): 2' fluoro-modified
  modified_base (11)..(11): 2' O-methyl modified
  modified_base (12)..(12): 2' O-methyl modified
  modified_base (13)..(13): 2' O-methyl modified
  modified_base (14)..(14): 2' fluoro-modified
  modified_base (15)..(15): 2' O-methyl modified
  modified_base (16)..(16): 2' fluoro-modified
  modified_base (17)..(17): 2' O-methyl modified
  modified_base (18)..(18): 2' fluoro-modified
  modified_base (19)..(19): 2' O-methyl modified
  misc_feature (19)..(20): Phosphorothioate linkage
  modified_base (20)..(20): 2' O-methyl modified
  misc_feature (20)..(21): Phosphorothioate linkage
  modified_base (21)..(21): 2' O-methyl modified
uaaaccccgccuuguaggcuu

SEQ ID NO: 14227 - RNA, 21 nt, Artificial Sequence
  Description of Artificial Sequence: Synthetic oligonucleotide
  modified_base (1)..(1): 2' O-methyl modified
  misc_feature (1)..(2): Phosphorothioate linkage
  modified_base (2)..(2): 2' fluoro-modified
  misc_feature (2)..(3): Phosphorothioate linkage
  modified_base (3)..(3): 2' O-methyl modified
  modified_base (4)..(4): 2' fluoro-modified
  modified_base (5)..(5): 2' O-methyl modified
  modified_base (6)..(6): 2' fluoro-modified
  modified_base (7)..(7): 2' O-methyl modified
  modified_base (8)..(8): 2' fluoro-modified
  modified_base (9)..(9): 2' O-methyl modified
  modified_base (10)..(10): 2' fluoro-modified
  modified_base (11)..(11): 2' O-methyl modified
  modified_base (12)..(12): 2' O-methyl modified
  modified_base (13)..(13): 2' O-methyl modified
  modified_base (14)..(14): 2' fluoro-modified
  modified_base (15)..(15): 2' O-methyl modified
  modified_base (16)..(16): 2' fluoro-modified
  modified_base (17)..(17): 2' O-methyl modified
  modified_base (18)..(18): 2' fluoro-modified
  modified_base (19)..(19): 2' O-methyl modified
  misc_feature (19)..(20): Phosphorothioate linkage
  modified_base (20)..(20): 2' O-methyl modified
  misc_feature (20)..(21): Phosphorothioate linkage
  modified_base (21)..(21): 2' O-methyl modified
ucccaaaccccgccuuguauu

SEQ ID NO: 14228 - RNA, 21 nt, Artificial Sequence
  Description of Artificial Sequence: Synthetic oligonucleotide
  modified_base (1)..(1): 2' O-methyl modified
  misc_feature (1)..(2): Phosphorothioate linkage
  modified_base (2)..(2): 2' fluoro-modified
  misc_feature (2)..(3): Phosphorothioate linkage
  modified_base (3)..(3): 2' O-methyl modified
  modified_base (4)..(4): 2' fluoro-modified
  modified_base (5)..(5): 2' O-methyl modified
  modified_base (6)..(6): 2' fluoro-modified
  modified_base (7)..(7): 2' O-methyl modified
  modified_base (8)..(8): 2' fluoro-modified
  modified_base (9)..(9): 2' O-methyl modified
  modified_base (10)..(10): 2' fluoro-modified
  modified_base (11)..(11): 2' O-methyl modified
  modified_base (12)..(12): 2' O-methyl modified
  modified_base (13)..(13): 2' O-methyl modified
  modified_base (14)..(14): 2' fluoro-modified
  modified_base (15)..(15): 2' O-methyl modified
  modified_base (16)..(16): 2' fluoro-modified
  modified_base (17)..(17): 2' O-methyl modified
  modified_base (18)..(18): 2' fluoro-modified
  modified_base (19)..(19): 2' O-methyl modified
  misc_feature (19)..(20): Phosphorothioate linkage
  modified_base (20)..(20): 2' O-methyl modified
  misc_feature (20)..(21): Phosphorothioate linkage
  modified_base (21)..(21): 2' O-methyl modified
uggauccccaaaccccgccuu

SEQ ID NO: 14229 - RNA, 21 nt, Artificial Sequence
  Description of Artificial Sequence: Synthetic oligonucleotide
  modified_base (1)..(1): 2' O-methyl modified
  misc_feature (1)..(2): Phosphorothioate linkage
  modified_base (2)..(2): 2' fluoro-modified
  misc_feature (2)..(3): Phosphorothioate linkage
  modified_base (3)..(3): 2' O-methyl modified
  modified_base (4)..(4): 2' fluoro-modified
  modified_base (5)..(5): 2' O-methyl modified
  modified_base (6)..(6): 2' fluoro-modified
  modified_base (7)..(7): 2' O-methyl modified
  modified_base (8)..(8): 2' fluoro-modified
  modified_base (9)..(9): 2' O-methyl modified
  modified_base (10)..(10): 2' fluoro-modified
  modified_base (11)..(11): 2' O-methyl modified
  modified_base (12)..(12): 2' O-methyl modified
  modified_base (13)..(13): 2' O-methyl modified
  modified_base (14)..(14): 2' fluoro-modified
  modified_base (15)..(15): 2' O-methyl modified
  modified_base (16)..(16): 2' fluoro-modified
  modified_base (17)..(17): 2' O-methyl modified
  modified_base (18)..(18): 2' fluoro-modified
  modified_base (19)..(19): 2' O-methyl modified
  misc_feature (19)..(20): Phosphorothioate linkage
  modified_base (20)..(20): 2' O-methyl modified
  misc_feature (20)..(21): Phosphorothioate linkage
  modified_base (21)..(21): 2' O-methyl modified
ugaugcuaugcaccuucucuu

SEQ ID NO: 14230 - RNA, 21 nt, Artificial Sequence
  Description of Artificial Sequence: Synthetic oligonucleotide
  modified_base (1)..(1): 2' O-methyl modified
  misc_feature (1)..(2): Phosphorothioate linkage
  modified_base (2)..(2): 2' fluoro-modified
  misc_feature (2)..(3): Phosphorothioate linkage
  modified_base (3)..(3): 2' O-methyl modified
  modified_base (4)..(4): 2' fluoro-modified
  modified_base (5)..(5): 2' O-methyl modified
  modified_base (6)..(6): 2' fluoro-modified
  modified_base (7)..(7): 2' O-methyl modified
  modified_base (8)..(8): 2' fluoro-modified
  modified_base (9)..(9): 2' O-methyl modified
  modified_base (10)..(10): 2' fluoro-modified
  modified_base (11)..(11): 2' O-methyl modified
  modified_base (12)..(12): 2' O-methyl modified
  modified_base (13)..(13): 2' O-methyl modified
  modified_base (14)..(14): 2' fluoro-modified
  modified_base (15)..(15): 2' O-methyl modified
  modified_base (16)..(16): 2' fluoro-modified
  modified_base (17)..(17): 2' O-methyl modified
  modified_base (18)..(18): 2' fluoro-modified
  modified_base (19)..(19): 2' O-methyl modified
  misc_feature (19)..(20): Phosphorothioate linkage
  modified_base (20)..(20): 2' O-methyl modified
  misc_feature (20)..(21): Phosphorothioate linkage
  modified_base (21)..(21): 2' O-methyl modified
ugcguugccaucccaguccuu

SEQ ID NO: 14231 - RNA, 21 nt, Artificial Sequence
  Description of Artificial Sequence: Synthetic oligonucleotide
  modified_base (1)..(1): 2' O-methyl modified
  misc_feature (1)..(2): Phosphorothioate linkage
  modified_base (2)..(2): 2' fluoro-modified
  misc_feature (2)..(3): Phosphorothioate linkage
  modified_base (3)..(3): 2' O-methyl modified
  modified_base (4)..(4): 2' fluoro-modified
  modified_base (5)..(5): 2' O-methyl modified
  modified_base (6)..(6): 2' fluoro-modified
  modified_base (7)..(7): 2' O-methyl modified
  modified_base (8)..(8): 2' fluoro-modified
  modified_base (9)..(9): 2' O-methyl modified
  modified_base (10)..(10): 2' fluoro-modified
  modified_base (11)..(11): 2' O-methyl modified
  modified_base (12)..(12): 2' O-methyl modified
  modified_base (13)..(13): 2' O-methyl modified
  modified_base (14)..(14): 2' fluoro-modified
  modified_base (15)..(15): 2' O-methyl modified
  modified_base (16)..(16): 2' fluoro-modified
  modified_base (17)..(17): 2' O-methyl modified
  modified_base (18)..(18): 2' fluoro-modified
  modified_base (19)..(19): 2' O-methyl modified
  misc_feature (19)..(20): Phosphorothioate linkage
  modified_base (20)..(20): 2' O-methyl modified
  misc_feature (20)..(21): Phosphorothioate linkage
  modified_base (21)..(21): 2' O-methyl modified
uggcguugccaucccagucuu

SEQ ID NO: 14232 - RNA, 21 nt, Artificial Sequence
  Description of Artificial Sequence: Synthetic oligonucleotide
  modified_base (1)..(1): 2' O-methyl modified
  misc_feature (1)..(2): Phosphorothioate linkage
  modified_base (2)..(2): 2' fluoro-modified
  misc_feature (2)..(3): Phosphorothioate linkage
  modified_base (3)..(3): 2' O-methyl modified
  modified_base (4)..(4): 2' fluoro-modified
  modified_base (5)..(5): 2' O-methyl modified
  modified_base (6)..(6): 2' fluoro-modified
  modified_base (7)..(7): 2' O-methyl modified
  modified_base (8)..(8): 2' fluoro-modified
  modified_base (9)..(9): 2' O-methyl modified
  modified_base (10)..(10): 2' fluoro-modified
  modified_base (11)..(11): 2' O-methyl modified
  modified_base (12)..(12): 2' O-methyl modified
  modified_base (13)..(13): 2' O-methyl modified
  modified_base (14)..(14): 2' fluoro-modified
  modified_base (15)..(15): 2' O-methyl modified
  modified_base (16)..(16): 2' fluoro-modified
  modified_base (17)..(17): 2' O-methyl modified
  modified_base (18)..(18): 2' fluoro-modified
  modified_base (19)..(19): 2' O-methyl modified
  misc_feature (19)..(20): Phosphorothioate linkage
  modified_base (20)..(20): 2' O-methyl modified
  misc_feature (20)..(21): Phosphorothioate linkage
  modified_base (21)..(21): 2' O-methyl modified
ucucggcguugccaucccauu

SEQ ID NO: 14233 - RNA, 21 nt, Artificial Sequence
  Description of Artificial Sequence: Synthetic oligonucleotide
  modified_base (1)..(1): 2' O-methyl modified
  misc_feature (1)..(2): Phosphorothioate linkage
  modified_base (2)..(2): 2' fluoro-modified
  misc_feature (2)..(3): Phosphorothioate linkage
  modified_base (3)..(3): 2' O-methyl modified
  modified_base (4)..(4): 2' fluoro-modified
  modified_base (5)..(5): 2' O-methyl modified
  modified_base (6)..(6): 2' fluoro-modified
  modified_base (7)..(7): 2' O-methyl modified
  modified_base (8)..(8): 2' fluoro-modified
  modified_base (9)..(9): 2' O-methyl modified
  modified_base (10)..(10): 2' fluoro-modified
  modified_base (11)..(11): 2' O-methyl modified
  modified_base (12)..(12): 2' O-methyl modified
  modified_base (13)..(13): 2' O-methyl modified
  modified_base (14)..(14): 2' fluoro-modified
  modified_base (15)..(15): 2' O-methyl modified
  modified_base (16)..(16): 2' fluoro-modified
  modified_base (17)..(17): 2' O-methyl modified
  modified_base (18)..(18): 2' fluoro-modified
  modified_base (19)..(19): 2' O-methyl modified
  misc_feature (19)..(20): Phosphorothioate linkage
  modified_base (20)..(20): 2' O-methyl modified
  misc_feature (20)..(21): Phosphorothioate linkage
  modified_base (21)..(21): 2' O-methyl modified
uucgccacccaggugcacguu

SEQ ID NO: 14234 - RNA, 21 nt, Artificial Sequence
  Description of Artificial Sequence: Synthetic oligonucleotide
  modified_base (1)..(1): 2' O-methyl modified
  misc_feature (1)..(2): Phosphorothioate linkage
  modified_base (2)..(2): 2' fluoro-modified
  misc_feature (2)..(3): Phosphorothioate linkage
  modified_base (3)..(3): 2' O-methyl modified
  modified_base (4)..(4): 2' fluoro-modified
  modified_base (5)..(5): 2' O-methyl modified
  modified_base (6)..(6): 2' fluoro-modified
  modified_base (7)..(7): 2' O-methyl modified
  modified_base (8)..(8): 2' fluoro-modified
  modified_base (9)..(9): 2' O-methyl modified
  modified_base (10)..(10): 2' fluoro-modified
  modified_base (11)..(11): 2' O-methyl modified
  modified_base (12)..(12): 2' O-methyl modified
  modified_base (13)..(13): 2' O-methyl modified
  modified_base (14)..(14): 2' fluoro-modified
  modified_base (15)..(15): 2' O-methyl modified
  modified_base (16)..(16): 2' fluoro-modified
  modified_base (17)..(17): 2' O-methyl modified
  modified_base (18)..(18): 2' fluoro-modified
  modified_base (19)..(19): 2' O-methyl modified
  misc_feature (19)..(20): Phosphorothioate linkage
  modified_base (20)..(20): 2' O-methyl modified
  misc_feature (20)..(21): Phosphorothioate linkage
  modified_base (21)..(21): 2' O-methyl modified
uguggagaaggguacggaguu

SEQ ID NO: 14235 - RNA, 21 nt, Artificial Sequence
  Description of Artificial Sequence: Synthetic oligonucleotide
  modified_base (1)..(1): 2' O-methyl modified
  misc_feature (1)..(2): Phosphorothioate linkage
  modified_base (2)..(2): 2' fluoro-modified
  misc_feature (2)..(3): Phosphorothioate linkage
  modified_base (3)..(3): 2' O-methyl modified
  modified_base (4)..(4): 2' fluoro-modified
  modified_base (5)..(5): 2' O-methyl modified
  modified_base (6)..(6): 2' fluoro-modified
  modified_base (7)..(7): 2' O-methyl modified
  modified_base (8)..(8): 2' fluoro-modified
  modified_base (9)..(9): 2' O-methyl modified
  modified_base (10)..(10): 2' fluoro-modified
  modified_base (11)..(11): 2' O-methyl modified
  modified_base (12)..(12): 2' O-methyl modified
  modified_base (13)..(13): 2' O-methyl modified
  modified_base (14)..(14): 2' fluoro-modified
  modified_base (15)..(15): 2' O-methyl modified
  modified_base (16)..(16): 2' fluoro-modified
  modified_base (17)..(17): 2' O-methyl modified
  modified_base (18)..(18): 2' fluoro-modified
  modified_base (19)..(19): 2' O-methyl modified
  misc_feature (19)..(20): Phosphorothioate linkage
  modified_base (20)..(20): 2' O-methyl modified
  misc_feature (20)..(21): Phosphorothioate linkage
  modified_base (21)..(21): 2' O-methyl modified
uaguggagaaggguacggauu

SEQ ID NO: 14236 - RNA, 21 nt, Artificial Sequence
  Description of Artificial Sequence: Synthetic oligonucleotide
  modified_base (1)..(1): 2' O-methyl modified
  misc_feature (1)..(2): Phosphorothioate linkage
  modified_base (2)..(2): 2' fluoro-modified
  misc_feature (2)..(3): Phosphorothioate linkage
  modified_base (3)..(3): 2' O-methyl modified
  modified_base (4)..(4): 2' fluoro-modified
  modified_base (5)..(5): 2' O-methyl modified
  modified_base (6)..(6): 2' fluoro-modified
  modified_base (7)..(7): 2' O-methyl modified
  modified_base (8)..(8): 2' fluoro-modified
  modified_base (9)..(9): 2' O-methyl modified
  modified_base (10)..(10): 2' fluoro-modified
  modified_base (11)..(11): 2' O-methyl modified
  modified_base (12)..(12): 2' O-methyl modified
  modified_base (13)..(13): 2' O-methyl modified
  modified_base (14)..(14): 2' fluoro-modified
  modified_base (15)..(15): 2' O-methyl modified
  modified_base (16)..(16): 2' fluoro-modified
  modified_base (17)..(17): 2' O-methyl modified
  modified_base (18)..(18): 2' fluoro-modified
  modified_base (19)..(19): 2' O-methyl modified
  misc_feature (19)..(20): Phosphorothioate linkage
  modified_base (20)..(20): 2' O-methyl modified
  misc_feature (20)..(21): Phosphorothioate linkage
  modified_base (21)..(21): 2' O-methyl modified
uccaaguggagaaggguacuu

SEQ ID NO: 14237 - RNA, 21 nt, Artificial Sequence
  Description of Artificial Sequence: Synthetic oligonucleotide
  modified_base (1)..(1): 2' O-methyl modified
  misc_feature (1)..(2): Phosphorothioate linkage
  modified_base (2)..(2): 2' fluoro-modified
  misc_feature (2)..(3): Phosphorothioate linkage
  modified_base (3)..(3): 2' O-methyl modified
  modified_base (4)..(4): 2' fluoro-modified
  modified_base (5)..(5): 2' O-methyl modified
  modified_base (6)..(6): 2' fluoro-modified
  modified_base (7)..(7): 2' O-methyl modified
  modified_base (8)..(8): 2' fluoro-modified
  modified_base (9)..(9): 2' O-methyl modified
  modified_base (10)..(10): 2' fluoro-modified
  modified_base (11)..(11): 2' O-methyl modified
  modified_base (12)..(12): 2' O-methyl modified
  modified_base (13)..(13): 2' O-methyl modified
  modified_base (14)..(14): 2' fluoro-modified
  modified_base (15)..(15): 2' O-methyl modified
  modified_base (16)..(16): 2' fluoro-modified
  modified_base (17)..(17): 2' O-methyl modified
  modified_base (18)..(18): 2' fluoro-modified
  modified_base (19)..(19): 2' O-methyl modified
  misc_feature (19)..(20): Phosphorothioate linkage
  modified_base (20)..(20): 2' O-methyl modified
  misc_feature (20)..(21): Phosphorothioate linkage
  modified_base (21)..(21): 2' O-methyl modified
ugugauccuggucccaaguuu

SEQ ID NO: 14238 - RNA, 21 nt, Artificial Sequence
  Description of Artificial Sequence: Synthetic oligonucleotide
  modified_base (1)..(1): 2' O-methyl modified
  misc_feature (1)..(2): Phosphorothioate linkage
  modified_base (2)..(2): 2' fluoro-modified
  misc_feature (2)..(3): Phosphorothioate linkage
  modified_base (3)..(3): 2' O-methyl modified
  modified_base (4)..(4): 2' fluoro-modified
  modified_base (5)..(5): 2' O-methyl modified
  modified_base (6)..(6): 2' fluoro-modified
  modified_base (7)..(7): 2' O-methyl modified
  modified_base (8)..(8): 2' fluoro-modified
  modified_base (9)..(9): 2' O-methyl modified
  modified_base (10)..(10): 2' fluoro-modified
  modified_base (11)..(11): 2' O-methyl modified
  modified_base (12)..(12): 2' O-methyl modified
  modified_base (13)..(13): 2' O-methyl modified
  modified_base (14)..(14): 2' fluoro-modified
  modified_base (15)..(15): 2' O-methyl modified
  modified_base (16)..(16): 2' fluoro-modified
  modified_base (17)..(17): 2' O-methyl modified
  modified_base (18)..(18): 2' fluoro-modified
  modified_base (19)..(19): 2' O-methyl modified
  misc_feature (19)..(20): Phosphorothioate linkage
  modified_base (20)..(20): 2' O-methyl modified
  misc_feature (20)..(21): Phosphorothioate linkage
  modified_base (21)..(21): 2' O-methyl modified
uucgugauccuggucccaauu

SEQ ID NO: 14239 - RNA, 21 nt, Artificial Sequence
  Description of Artificial Sequence: Synthetic oligonucleotide
  modified_base (1)..(1): 2' O-methyl modified
  misc_feature (1)..(2): Phosphorothioate linkage
  modified_base (2)..(2): 2' fluoro-modified
  misc_feature (2)..(3): Phosphorothioate linkage
  modified_base (3)..(3): 2' O-methyl modified
  modified_base (4)..(4): 2' fluoro-modified
  modified_base (5)..(5): 2' O-methyl modified
  modified_base (6)..(6): 2' fluoro-modified
  modified_base (7)..(7): 2' O-methyl modified
  modified_base (8)..(8): 2' fluoro-modified
  modified_base (9)..(9): 2' O-methyl modified
  modified_base (10)..(10): 2' fluoro-modified
  modified_base (11)..(11): 2' O-methyl modified
  modified_base (12)..(12): 2' O-methyl modified
  modified_base (13)..(13): 2' O-methyl modified
  modified_base (14)..(14): 2' fluoro-modified
  modified_base (15)..(15): 2' O-methyl modified
  modified_base (16)..(16): 2' fluoro-modified
  modified_base (17)..(17): 2' O-methyl modified
  modified_base (18)..(18): 2' fluoro-modified
  modified_base (19)..(19): 2' O-methyl modified
  misc_feature (19)..(20): Phosphorothioate linkage
  modified_base (20)..(20): 2' O-methyl modified
  misc_feature (20)..(21): Phosphorothioate linkage
  modified_base (21)..(21): 2' O-methyl modified
uggucgugauccuggucccuu

SEQ ID NO: 14240 - RNA, 21 nt, Artificial Sequence
  Description of Artificial Sequence: Synthetic oligonucleotide
  modified_base (1)..(1): 2' O-methyl modified
  misc_feature (1)..(2): Phosphorothioate linkage
  modified_base (2)..(2): 2' fluoro-modified
  misc_feature (2)..(3): Phosphorothioate linkage
  modified_base (3)..(3): 2' O-methyl modified
  modified_base (4)..(4): 2' fluoro-modified
  modified_base (5)..(5): 2' O-methyl modified
  modified_base (6)..(6): 2' fluoro-modified
  modified_base (7)..(7): 2' O-methyl modified
  modified_base (8)..(8): 2' fluoro-modified
  modified_base (9)..(9): 2' O-methyl modified
  modified_base (10)..(10): 2' fluoro-modified
  modified_base (11)..(11): 2' O-methyl modified
  modified_base (12)..(12): 2' O-methyl modified
  modified_base (13)..(13): 2' O-methyl modified
  modified_base (14)..(14): 2' fluoro-modified
  modified_base (15)..(15): 2' O-methyl modified
  modified_base (16)..(16): 2' fluoro-modified
  modified_base (17)..(17): 2' O-methyl modified
  modified_base (18)..(18): 2' fluoro-modified
  modified_base (19)..(19): 2' O-methyl modified
  misc_feature (19)..(20): Phosphorothioate linkage
  modified_base (20)..(20): 2' O-methyl modified
  misc_feature (20)..(21): Phosphorothioate linkage
  modified_base (21)..(21): 2' O-methyl modified
uaggucgugauccugguccuu

SEQ ID NO: 14241 - RNA, 21 nt, Artificial Sequence
  Description of Artificial Sequence: Synthetic oligonucleotide
  modified_base (1)..(1): 2' O-methyl modified
  misc_feature (1)..(2): Phosphorothioate linkage
  modified_base (2)..(2): 2' fluoro-modified
  misc_feature (2)..(3): Phosphorothioate linkage
  modified_base (3)..(3): 2' O-methyl modified
  modified_base (4)..(4): 2' fluoro-modified
  modified_base (5)..(5): 2' O-methyl modified
  modified_base (6)..(6): 2' fluoro-modified
  modified_base (7)..(7): 2' O-methyl modified
  modified_base (8)..(8): 2' fluoro-modified
  modified_base (9)..(9): 2' O-methyl modified
  modified_base (10)..(10): 2' fluoro-modified
  modified_base (11)..(11): 2' O-methyl modified
  modified_base (12)..(12): 2' O-methyl modified
  modified_base (13)..(13): 2' O-methyl modified
  modified_base (14)..(14): 2' fluoro-modified
  modified_base (15)..(15): 2' O-methyl modified
  modified_base (16)..(16): 2' fluoro-modified
  modified_base (17)..(17): 2' O-methyl modified
  modified_base (18)..(18): 2' fluoro-modified
  modified_base (19)..(19): 2' O-methyl modified
  misc_feature (19)..(20): Phosphorothioate linkage
  modified_base (20)..(20): 2' O-methyl modified
  misc_feature (20)..(21): Phosphorothioate linkage
  modified_base (21)..(21): 2' O-methyl modified
ugaggucgugauccuggucuu

SEQ ID NO: 14242 - RNA, 21 nt, Artificial Sequence
  Description of Artificial Sequence: Synthetic oligonucleotide
  modified_base (1)..(1): 2' O-methyl modified
  misc_feature (1)..(2): Phosphorothioate linkage
  modified_base (2)..(2): 2' fluoro-modified
  misc_feature (2)..(3): Phosphorothioate linkage
  modified_base (3)..(3): 2' O-methyl modified
  modified_base (4)..(4): 2' fluoro-modified
  modified_base (5)..(5): 2' O-methyl modified
  modified_base (6)..(6): 2' fluoro-modified
  modified_base (7)..(7): 2' O-methyl modified
  modified_base (8)..(8): 2' fluoro-modified
  modified_base (9)..(9): 2' O-methyl modified
  modified_base (10)..(10): 2' fluoro-modified
  modified_base (11)..(11): 2' O-methyl modified
  modified_base (12)..(12): 2' O-methyl modified
  modified_base (13)..(13): 2' O-methyl modified
  modified_base (14)..(14): 2' fluoro-modified
  modified_base (15)..(15): 2' O-methyl modified
  modified_base (16)..(16): 2' fluoro-modified
  modified_base (17)..(17): 2' O-methyl modified
  modified_base (18)..(18): 2' fluoro-modified
  modified_base (19)..(19): 2' O-methyl modified
  misc_feature (19)..(20): Phosphorothioate linkage
  modified_base (20)..(20): 2' O-methyl modified
  misc_feature (20)..(21): Phosphorothioate linkage
  modified_base (21)..(21): 2' O-methyl modified
ucggaggucgugauccugguu

SEQ ID NO: 14243 - RNA, 21 nt, Artificial Sequence
  Description of Artificial Sequence: Synthetic oligonucleotide
  modified_base (1)..(1): 2' O-methyl modified
  misc_feature (1)..(2): Phosphorothioate linkage
  modified_base (2)..(2): 2' fluoro-modified
  misc_feature (2)..(3): Phosphorothioate linkage
  modified_base (3)..(3): 2' O-methyl modified
  modified_base (4)..(4): 2' fluoro-modified
  modified_base (5)..(5): 2' O-methyl modified
  modified_base (6)..(6): 2' fluoro-modified
  modified_base (7)..(7): 2' O-methyl modified
  modified_base (8)..(8): 2' fluoro-modified
  modified_base (9)..(9): 2' O-methyl modified
  modified_base (10)..(10): 2' fluoro-modified
  modified_base (11)..(11): 2' O-methyl modified
  modified_base (12)..(12): 2' O-methyl modified
  modified_base (13)..(13): 2' O-methyl modified
  modified_base (14)..(14): 2' fluoro-modified
  modified_base (15)..(15): 2' O-methyl modified
  modified_base (16)..(16): 2' fluoro-modified
  modified_base (17)..(17): 2' O-methyl modified
  modified_base (18)..(18): 2' fluoro-modified
  modified_base (19)..(19): 2' O-methyl modified
  misc_feature (19)..(20): Phosphorothioate linkage
  modified_base (20)..(20): 2' O-methyl modified
  misc_feature (20)..(21): Phosphorothioate linkage
  modified_base (21)..(21): 2' O-methyl modified
ugcggaggucgugauccuguu

SEQ ID NO: 14244 - RNA, 21 nt, Artificial Sequence
  Description of Artificial Sequence: Synthetic oligonucleotide
  modified_base (1)..(1): 2' O-methyl modified
  misc_feature (1)..(2): Phosphorothioate linkage
  modified_base (2)..(2): 2' fluoro-modified
  misc_feature (2)..(3): Phosphorothioate linkage
  modified_base (3)..(3): 2' O-methyl modified
  modified_base (4)..(4): 2' fluoro-modified
  modified_base (5)..(5): 2' O-methyl modified
  modified_base (6)..(6): 2' fluoro-modified
  modified_base (7)..(7): 2' O-methyl modified
  modified_base (8)..(8): 2' fluoro-modified
  modified_base (9)..(9): 2' O-methyl modified
  modified_base (10)..(10): 2' fluoro-modified
  modified_base (11)..(11): 2' O-methyl modified
  modified_base (12)..(12): 2' O-methyl modified
  modified_base (13)..(13): 2' O-methyl modified
  modified_base (14)..(14): 2' fluoro-modified
  modified_base (15)..(15): 2' O-methyl modified
  modified_base (16)..(16): 2' fluoro-modified
  modified_base (17)..(17): 2' O-methyl modified
  modified_base (18)..(18): 2' fluoro-modified
  modified_base (19)..(19): 2' O-methyl modified
  misc_feature (19)..(20): Phosphorothioate linkage
  modified_base (20)..(20): 2' O-methyl modified
  misc_feature (20)..(21): Phosphorothioate linkage
  modified_base (21)..(21): 2' O-methyl modified
uccugcggaggucgugaucuu

SEQ ID NO: 14245 - RNA, 21 nt, Artificial Sequence
  Description of Artificial Sequence: Synthetic oligonucleotide
  modified_base (1)..(1): 2' O-methyl modified
  misc_feature (1)..(2): Phosphorothioate linkage
  modified_base (2)..(2): 2' fluoro-modified
  misc_feature (2)..(3): Phosphorothioate linkage
  modified_base (3)..(3): 2' O-methyl modified
  modified_base (4)..(4): 2' fluoro-modified
  modified_base (5)..(5): 2' O-methyl modified
  modified_base (6)..(6): 2' fluoro-modified
  modified_base (7)..(7): 2' O-methyl modified
  modified_base (8)..(8): 2' fluoro-modified
  modified_base (9)..(9): 2' O-methyl modified
  modified_base (10)..(10): 2' fluoro-modified
  modified_base (11)..(11): 2' O-methyl modified
  modified_base (12)..(12): 2' O-methyl modified
  modified_base (13)..(13): 2' O-methyl modified
  modified_base (14)..(14): 2' fluoro-modified
  modified_base (15)..(15): 2' O-methyl modified
  modified_base (16)..(16): 2' fluoro-modified
  modified_base (17)..(17): 2' O-methyl modified
  modified_base (18)..(18): 2' fluoro-modified
  modified_base (19)..(19): 2' O-methyl modified
  misc_feature (19)..(20): Phosphorothioate linkage
  modified_base (20)..(20): 2' O-methyl modified
  misc_feature (20)..(21): Phosphorothioate linkage
  modified_base (21)..(21): 2' O-methyl modified
ucccugcggaggucgugauuu

SEQ ID NO: 14246 - RNA, 21 nt, Artificial Sequence
  Description of Artificial Sequence: Synthetic oligonucleotide
  modified_base (1)..(1): 2' O-methyl modified
  misc_feature (1)..(2): Phosphorothioate linkage
  modified_base (2)..(2): 2' fluoro-modified
  misc_feature (2)..(3): Phosphorothioate linkage
  modified_base (3)..(3): 2' O-methyl modified
  modified_base (4)..(4): 2' fluoro-modified
  modified_base (5)..(5): 2' O-methyl modified
  modified_base (6)..(6): 2' fluoro-modified
  modified_base (7)..(7): 2' O-methyl modified
  modified_base (8)..(8): 2' fluoro-modified
  modified_base (9)..(9): 2' O-methyl modified
  modified_base (10)..(10): 2' fluoro-modified
  modified_base (11)..(11): 2' O-methyl modified
  modified_base (12)..(12): 2' O-methyl modified
  modified_base (13)..(13): 2' O-methyl modified
  modified_base (14)..(14): 2' fluoro-modified
  modified_base (15)..(15): 2' O-methyl modified
  modified_base (16)..(16): 2' fluoro-modified
  modified_base (17)..(17): 2' O-methyl modified
  modified_base (18)..(18): 2' fluoro-modified
  modified_base (19)..(19): 2' O-methyl modified
  misc_feature (19)..(20): Phosphorothioate linkage
  modified_base (20)..(20): 2' O-methyl modified
  misc_feature (20)..(21): Phosphorothioate linkage
  modified_base (21)..(21): 2' O-methyl modified
ugucccugcggaggucguguu

SEQ ID NO: 14247 - RNA, 21 nt, Artificial Sequence
  Description of Artificial Sequence: Synthetic oligonucleotide
  modified_base (1)..(1): 2' O-methyl modified
  misc_feature (1)..(2): Phosphorothioate linkage
  modified_base (2)..(2): 2' fluoro-modified
  misc_feature (2)..(3): Phosphorothioate linkage
  modified_base (3)..(3): 2' O-methyl modified
  modified_base (4)..(4): 2' fluoro-modified
  modified_base (5)..(5): 2' O-methyl modified
  modified_base (6)..(6): 2' fluoro-modified
  modified_base (7)..(7): 2' O-methyl modified
  modified_base (8)..(8): 2' fluoro-modified
  modified_base (9)..(9): 2' O-methyl modified
  modified_base (10)..(10): 2' fluoro-modified
  modified_base (11)..(11): 2' O-methyl modified
  modified_base (12)..(12): 2' O-methyl modified
  modified_base (13)..(13): 2' O-methyl modified
  modified_base (14)..(14): 2' fluoro-modified
  modified_base (15)..(15): 2' O-methyl modified
  modified_base (16)..(16): 2' fluoro-modified
  modified_base (17)..(17): 2' O-methyl modified
  modified_base (18)..(18): 2' fluoro-modified
  modified_base (19)..(19): 2' O-methyl modified
  misc_feature (19)..(20): Phosphorothioate linkage
  modified_base (20)..(20): 2' O-methyl modified
  misc_feature (20)..(21): Phosphorothioate linkage
  modified_base (21)..(21): 2' O-methyl modified
uugucccugcggaggucguuu

SEQ ID NO: 14248 - RNA, 21 nt, Artificial Sequence
  Description of Artificial Sequence: Synthetic oligonucleotide
  modified_base (1)..(1): 2' O-methyl modified
  misc_feature (1)..(2): Phosphorothioate linkage
  modified_base (2)..(2): 2' fluoro-modified
  misc_feature (2)..(3): Phosphorothioate linkage
  modified_base (3)..(3): 2' O-methyl modified
  modified_base (4)..(4): 2' fluoro-modified
  modified_base (5)..(5): 2' O-methyl modified
  modified_base (6)..(6): 2' fluoro-modified
  modified_base (7)..(7): 2' O-methyl modified
  modified_base (8)..(8): 2' fluoro-modified
  modified_base (9)..(9): 2' O-methyl modified
  modified_base (10)..(10): 2' fluoro-modified
  modified_base (11)..(11): 2' O-methyl modified
  modified_base (12)..(12): 2' O-methyl modified
  modified_base (13)..(13): 2' O-methyl modified
  modified_base (14)..(14): 2' fluoro-modified
  modified_base (15)..(15): 2' O-methyl modified
  modified_base (16)..(16): 2' fluoro-modified
  modified_base (17)..(17): 2' O-methyl modified
  modified_base (18)..(18): 2' fluoro-modified
  modified_base (19)..(19): 2' O-methyl modified
  misc_feature (19)..(20): Phosphorothioate linkage
  modified_base (20)..(20): 2' O-methyl modified
  misc_feature (20)..(21): Phosphorothioate linkage
  modified_base (21)..(21): 2' O-methyl modified
uuugucccugcggaggucguu

SEQ ID NO: 14249 - RNA, 21 nt, Artificial Sequence
  Description of Artificial Sequence: Synthetic oligonucleotide
  modified_base (1)..(1): 2' O-methyl modified
  misc_feature (1)..(2): Phosphorothioate linkage
  modified_base (2)..(2): 2' fluoro-modified
  misc_feature (2)..(3): Phosphorothioate linkage
  modified_base (3)..(3): 2' O-methyl modified
  modified_base (4)..(4): 2' fluoro-modified
  modified_base (5)..(5): 2' O-methyl modified
  modified_base (6)..(6): 2' fluoro-modified
  modified_base (7)..(7): 2' O-methyl modified
  modified_base (8)..(8): 2' fluoro-modified
  modified_base (9)..(9): 2' O-methyl modified
  modified_base (10)..(10): 2' fluoro-modified
  modified_base (11)..(11): 2' O-methyl modified
  modified_base (12)..(12): 2' O-methyl modified
  modified_base (13)..(13): 2' O-methyl modified
  modified_base (14)..(14): 2' fluoro-modified
  modified_base (15)..(15): 2' O-methyl modified
  modified_base (16)..(16): 2' fluoro-modified
  modified_base (17)..(17): 2' O-methyl modified
  modified_base (18)..(18): 2' fluoro-modified
  modified_base (19)..(19): 2' O-methyl modified
  misc_feature (19)..(20): Phosphorothioate linkage
  modified_base (20)..(20): 2' O-methyl modified
  misc_feature (20)..(21): Phosphorothioate linkage
  modified_base (21)..(21): 2' O-methyl modified
uaguucuugucccugcggauu

SEQ ID NO: 14250 - RNA, 21 nt, Artificial Sequence
  Description of Artificial Sequence: Synthetic oligonucleotide
  modified_base (1)..(1): 2' O-methyl modified
  misc_feature (1)..(2): Phosphorothioate linkage
  modified_base (2)..(2): 2' fluoro-modified
  misc_feature (2)..(3): Phosphorothioate linkage
  modified_base (3)..(3): 2' O-methyl modified
  modified_base (4)..(4): 2' fluoro-modified
  modified_base (5)..(5): 2' O-methyl modified
  modified_base (6)..(6): 2' fluoro-modified
  modified_base (7)..(7): 2' O-methyl modified
  modified_base (8)..(8): 2' fluoro-modified
  modified_base (9)..(9): 2' O-methyl modified
  modified_base (10)..(10): 2' fluoro-modified
  modified_base (11)..(11): 2' O-methyl modified
  modified_base (12)..(12): 2' O-methyl modified
  modified_base (13)..(13): 2' O-methyl modified
  modified_base (14)..(14): 2' fluoro-modified
  modified_base (15)..(15): 2' O-methyl modified
  modified_base (16)..(16): 2' fluoro-modified
  modified_base (17)..(17): 2' O-methyl modified
  modified_base (18)..(18): 2' fluoro-modified
  modified_base (19)..(19): 2' O-methyl modified
  misc_feature (19)..(20): Phosphorothioate linkage
  modified_base (20)..(20): 2' O-methyl modified
  misc_feature (20)..(21): Phosphorothioate linkage
  modified_base (21)..(21): 2' O-methyl modified
ucaguucuugucccugcgguu

SEQ ID NO: 14251 - RNA, 21 nt, Artificial Sequence
  Description of Artificial Sequence: Synthetic oligonucleotide
  modified_base (1)..(1): 2' O-methyl modified
  misc_feature (1)..(2): Phosphorothioate linkage
  modified_base (2)..(2): 2' fluoro-modified
  misc_feature (2)..(3): Phosphorothioate linkage
  modified_base (3)..(3): 2' O-methyl modified
  modified_base (4)..(4): 2' fluoro-modified
  modified_base (5)..(5): 2' O-methyl modified
  modified_base (6)..(6): 2' fluoro-modified
  modified_base (7)..(7): 2' O-methyl modified
  modified_base (8)..(8): 2' fluoro-modified
  modified_base (9)..(9): 2' O-methyl modified
  modified_base (10)..(10): 2' fluoro-modified
  modified_base (11)..(11): 2' O-methyl modified
  modified_base (12)..(12): 2' O-methyl modified
  modified_base (13)..(13): 2' O-methyl modified
  modified_base (14)..(14): 2' fluoro-modified
  modified_base (15)..(15): 2' O-methyl modified
  modified_base (16)..(16): 2' fluoro-modified
  modified_base (17)..(17): 2' O-methyl modified
  modified_base (18)..(18): 2' fluoro-modified
  modified_base (19)..(19): 2' O-methyl modified
  misc_feature (19)..(20): Phosphorothioate linkage
  modified_base (20)..(20): 2' O-methyl modified
  misc_feature (20)..(21): Phosphorothioate linkage
  modified_base (21)..(21): 2' O-methyl modified
uggagcggaaguacuggccuu

SEQ ID NO: 14252 - RNA, 21 nt, Artificial Sequence
  Description of Artificial Sequence: Synthetic oligonucleotide
  modified_base (1)..(1): 2' O-methyl modified
  misc_feature (1)..(2): Phosphorothioate linkage
  modified_base (2)..(2): 2' fluoro-modified
  misc_feature (2)..(3): Phosphorothioate linkage
  modified_base (3)..(3): 2' O-methyl modified
  modified_base (4)..(4): 2' fluoro-modified
  modified_base (5)..(5): 2' O-methyl modified
  modified_base (6)..(6): 2' fluoro-modified
  modified_base (7)..(7): 2' O-methyl modified
  modified_base (8)..(8): 2' fluoro-modified
  modified_base (9)..(9): 2' O-methyl modified
  modified_base (10)..(10): 2' fluoro-modified
  modified_base (11)..(11): 2' O-methyl modified
  modified_base (12)..(12): 2' O-methyl modified
  modified_base (13)..(13): 2' O-methyl modified
  modified_base (14)..(14): 2' fluoro-modified
  modified_base (15)..(15): 2' O-methyl modified
  modified_base (16)..(16): 2' fluoro-modified
  modified_base (17)..(17): 2' O-methyl modified
  modified_base (18)..(18): 2' fluoro-modified
  modified_base (19)..(19): 2' O-methyl modified
  misc_feature (19)..(20): Phosphorothioate linkage
  modified_base (20)..(20): 2' O-methyl modified
  misc_feature (20)..(21): Phosphorothioate linkage
  modified_base (21)..(21): 2' O-methyl modified
uuggagcggaaguacuggcuu

SEQ ID NO: 14253 - RNA, 21 nt, Artificial Sequence
  Description of Artificial Sequence: Synthetic oligonucleotide
  modified_base (1)..(1): 2' O-methyl modified
  misc_feature (1)..(2): Phosphorothioate linkage
  modified_base (2)..(2): 2' fluoro-modified
  misc_feature (2)..(3): Phosphorothioate linkage
  modified_base (3)..(3): 2' O-methyl modified
  modified_base (4)..(4): 2' fluoro-modified
  modified_base (5)..(5): 2' O-methyl modified
  modified_base (6)..(6): 2' fluoro-modified
  modified_base (7)..(7): 2' O-methyl modified
  modified_base (8)..(8): 2' fluoro-modified
  modified_base (9)..(9): 2' O-methyl modified
  modified_base (10)..(10): 2' fluoro-modified
  modified_base (11)..(11): 2' O-methyl modified
  modified_base (12)..(12): 2' O-methyl modified
  modified_base (13)..(13): 2' O-methyl modified
  modified_base (14)..(14): 2' fluoro-modified
  modified_base (15)..(15): 2' O-methyl modified
  modified_base (16)..(16): 2' fluoro-modified
  modified_base (17)..(17): 2' O-methyl modified
  modified_base (18)..(18): 2' fluoro-modified
  modified_base (19)..(19): 2' O-methyl modified
  misc_feature (19)..(20): Phosphorothioate linkage
  modified_base (20)..(20): 2' O-methyl modified
  misc_feature (20)..(21): Phosphorothioate linkage
  modified_base (21)..(21): 2' O-methyl modified
ugguaguagcggccccgccuu

SEQ ID NO: 14254 - RNA, 21 nt, Artificial Sequence
  Description of Artificial Sequence: Synthetic oligonucleotide
  modified_base (1)..(1): 2' O-methyl modified
  misc_feature (1)..(2): Phosphorothioate linkage
  modified_base (2)..(2): 2' fluoro-modified
  misc_feature (2)..(3): Phosphorothioate linkage
  modified_base (3)..(3): 2' O-methyl modified
  modified_base (4)..(4): 2' fluoro-modified
  modified_base (5)..(5): 2' O-methyl modified
  modified_base (6)..(6): 2' fluoro-modified
  modified_base (7)..(7): 2' O-methyl modified
  modified_base (8)..(8): 2' fluoro-modified
  modified_base (9)..(9): 2' O-methyl modified
  modified_base (10)..(10): 2' fluoro-modified
  modified_base (11)..(11): 2' O-methyl modified
  modified_base (12)..(12): 2' O-methyl modified
  modified_base (13)..(13): 2' O-methyl modified
  modified_base (14)..(14): 2' fluoro-modified
  modified_base (15)..(15): 2' O-methyl modified
  modified_base (16)..(16): 2' fluoro-modified
  modified_base (17)..(17): 2' O-methyl modified
  modified_base (18)..(18): 2' fluoro-modified
  modified_base (19)..(19): 2' O-methyl modified
  misc_feature (19)..(20): Phosphorothioate linkage
  modified_base (20)..(20): 2' O-methyl modified
  misc_feature (20)..(21): Phosphorothioate linkage
  modified_base (21)..(21): 2' O-methyl modified
ucaacauggugguggccuguu

SEQ ID NO: 14255 - RNA, 21 nt, Artificial Sequence
  Description of Artificial Sequence: Synthetic oligonucleotide
  modified_base (1)..(1): 2' O-methyl modified
  misc_feature (1)..(2): Phosphorothioate linkage
  modified_base (2)..(2): 2' fluoro-modified
  misc_feature (2)..(3): Phosphorothioate linkage
  modified_base (3)..(3): 2' O-methyl modified
  modified_base (4)..(4): 2' fluoro-modified
  modified_base (5)..(5): 2' O-methyl modified
  modified_base (6)..(6): 2' fluoro-modified
  modified_base (7)..(7): 2' O-methyl modified
  modified_base (8)..(8): 2' fluoro-modified
  modified_base (9)..(9): 2' O-methyl modified
  modified_base (10)..(10): 2' fluoro-modified
  modified_base (11)..(11): 2' O-methyl modified
  modified_base (12)..(12): 2' O-methyl modified
  modified_base (13)..(13): 2' O-methyl modified
  modified_base (14)..(14): 2' fluoro-modified
  modified_base (15)..(15): 2' O-methyl modified
  modified_base (16)..(16): 2' fluoro-modified
  modified_base (17)..(17): 2' O-methyl modified
  modified_base (18)..(18): 2' fluoro-modified
  modified_base (19)..(19): 2' O-methyl modified
  misc_feature (19)..(20): Phosphorothioate linkage
  modified_base (20)..(20): 2' O-methyl modified
  misc_feature (20)..(21): Phosphorothioate linkage
  modified_base (21)..(21): 2' O-methyl modified
uuggaucaacauggugguguu

SEQ ID NO: 14256 - RNA, 21 nt, Artificial Sequence
  Description of Artificial Sequence: Synthetic oligonucleotide
  modified_base (1)..(1): 2' O-methyl modified
  misc_feature (1)..(2): Phosphorothioate linkage
  modified_base (2)..(2): 2' fluoro-modified
  misc_feature (2)..(3): Phosphorothioate linkage
  modified_base (3)..(3): 2' O-methyl modified
  modified_base (4)..(4): 2' fluoro-modified
  modified_base (5)..(5): 2' O-methyl modified
  modified_base (6)..(6): 2' fluoro-modified
  modified_base (7)..(7): 2' O-methyl modified
  modified_base (8)..(8): 2' fluoro-modified
  modified_base (9)..(9): 2' O-methyl modified
  modified_base (10)..(10): 2' fluoro-modified
  modified_base (11)..(11): 2' O-methyl modified
  modified_base (12)..(12): 2' O-methyl modified
  modified_base (13)..(13): 2' O-methyl modified
  modified_base (14)..(14): 2' fluoro-modified
  modified_base (15)..(15): 2' O-methyl modified
  modified_base (16)..(16): 2' fluoro-modified
  modified_base (17)..(17): 2' O-methyl modified
  modified_base (18)..(18): 2' fluoro-modified
  modified_base (19)..(19): 2' O-methyl modified
  misc_feature (19)..(20): Phosphorothioate linkage
  modified_base (20)..(20): 2' O-methyl modified
  misc_feature (20)..(21): Phosphorothioate linkage
  modified_base (21)..(21): 2' O-methyl modified
ugggcuggaucaacaugguuu

SEQ ID NO: 14257 - RNA, 21 nt, Artificial Sequence
  Description of Artificial Sequence: Synthetic oligonucleotide
  modified_base (1)..(1): 2' O-methyl modified
  misc_feature (1)..(2): Phosphorothioate linkage
  modified_base (2)..(2): 2' fluoro-modified
  misc_feature (2)..(3): Phosphorothioate linkage
  modified_base (3)..(3): 2' O-methyl modified
  modified_base (4)..(4): 2' fluoro-modified
  modified_base (5)..(5): 2' O-methyl modified
  modified_base (6)..(6): 2' fluoro-modified
  modified_base (7)..(7): 2' O-methyl modified
  modified_base (8)..(8): 2' fluoro-modified
  modified_base (9)..(9): 2' O-methyl modified
  modified_base (10)..(10): 2' fluoro-modified
  modified_base (11)..(11): 2' O-methyl modified
  modified_base (12)..(12): 2' O-methyl modified
  modified_base (13)..(13): 2' O-methyl modified
  modified_base (14)..(14): 2' fluoro-modified
  modified_base (15)..(15): 2' O-methyl modified
  modified_base (16)..(16): 2' fluoro-modified
  modified_base (17)..(17): 2' O-methyl modified
  modified_base (18)..(18): 2' fluoro-modified
  modified_base (19)..(19): 2' O-methyl modified
  misc_feature (19)..(20): Phosphorothioate linkage
  modified_base (20)..(20): 2' O-methyl modified
  misc_feature (20)..(21): Phosphorothioate linkage
  modified_base (21)..(21): 2' O-methyl modified
uugggcuggaucaacaugguu

SEQ ID NO: 14258 - RNA, 21 nt, Artificial Sequence
  Description of Artificial Sequence: Synthetic oligonucleotide
  modified_base (1)..(1): 2' O-methyl modified
  misc_feature (1)..(2): Phosphorothioate linkage
  modified_base (2)..(2): 2' fluoro-modified
  misc_feature (2)..(3): Phosphorothioate linkage
  modified_base (3)..(3): 2' O-methyl modified
  modified_base (4)..(4): 2' fluoro-modified
  modified_base (5)..(5): 2' O-methyl modified
  modified_base (6)..(6): 2' fluoro-modified
  modified_base (7)..(7): 2' O-methyl modified
  modified_base (8)..(8): 2' fluoro-modified
  modified_base (9)..(9): 2' O-methyl modified
  modified_base (10)..(10): 2' fluoro-modified
  modified_base (11)..(11): 2' O-methyl modified
  modified_base (12)..(12): 2' O-methyl modified
  modified_base (13)..(13): 2' O-methyl modified
  modified_base (14)..(14): 2' fluoro-modified
  modified_base (15)..(15): 2' O-methyl modified
  modified_base (16)..(16): 2' fluoro-modified
  modified_base (17)..(17): 2' O-methyl modified
  modified_base (18)..(18): 2' fluoro-modified
  modified_base (19)..(19): 2' O-methyl modified
  misc_feature (19)..(20): Phosphorothioate linkage
  modified_base (20)..(20): 2' O-methyl modified
  misc_feature (20)..(21): Phosphorothioate linkage
  modified_base (21)..(21): 2' O-methyl modified
ucgggcagagccaagagucuu

SEQ ID NO: 14259 - RNA, 21 nt, Artificial Sequence
  Description of Artificial Sequence: Synthetic oligonucleotide
  modified_base (1)..(1): 2' O-methyl modified
  misc_feature (1)..(2): Phosphorothioate linkage
  modified_base (2)..(2): 2' fluoro-modified
  misc_feature (2)..(3): Phosphorothioate linkage
  modified_base (3)..(3): 2' O-methyl modified
  modified_base (4)..(4): 2' fluoro-modified
  modified_base (5)..(5): 2' O-methyl modified
  modified_base (6)..(6): 2' fluoro-modified
  modified_base (7)..(7): 2' O-methyl modified
  modified_base (8)..(8): 2' fluoro-modified
  modified_base (9)..(9): 2' O-methyl modified
  modified_base (10)..(10): 2' fluoro-modified
  modified_base (11)..(11): 2' O-methyl modified
  modified_base (12)..(12): 2' O-methyl modified
  modified_base (13)..(13): 2' O-methyl modified
  modified_base (14)..(14): 2' fluoro-modified
  modified_base (15)..(15): 2' O-methyl modified
  modified_base (16)..(16): 2' fluoro-modified
  modified_base (17)..(17): 2' O-methyl modified
  modified_base (18)..(18): 2' fluoro-modified
  modified_base (19)..(19): 2' O-methyl modified
  misc_feature (19)..(20): Phosphorothioate linkage
  modified_base (20)..(20): 2' O-methyl modified
  misc_feature (20)..(21): Phosphorothioate linkage
  modified_base (21)..(21): 2' O-methyl modified
uucgggcagagccaagaguuu

SEQ ID NO: 14260 - RNA, 21 nt, Artificial Sequence
  Description of Artificial Sequence: Synthetic oligonucleotide
  modified_base (1)..(1): 2' O-methyl modified
  misc_feature (1)..(2): Phosphorothioate linkage
  modified_base (2)..(2): 2' fluoro-modified
  misc_feature (2)..(3): Phosphorothioate linkage
  modified_base (3)..(3): 2' O-methyl modified
  modified_base (4)..(4): 2' fluoro-modified
  modified_base (5)..(5): 2' O-methyl modified
  modified_base (6)..(6): 2' fluoro-modified
  modified_base (7)..(7): 2' O-methyl modified
  modified_base (8)..(8): 2' fluoro-modified
  modified_base (9)..(9): 2' O-methyl modified
  modified_base (10)..(10): 2' fluoro-modified
  modified_base (11)..(11): 2' O-methyl modified
  modified_base (12)..(12): 2' O-methyl modified
  modified_base (13)..(13): 2' O-methyl modified
  modified_base (14)..(14): 2' fluoro-modified
  modified_base (15)..(15): 2' O-methyl modified
  modified_base (16)..(16): 2' fluoro-modified
  modified_base (17)..(17): 2' O-methyl modified
  modified_base (18)..(18): 2' fluoro-modified
  modified_base (19)..(19): 2' O-methyl modified
  misc_feature (19)..(20): Phosphorothioate linkage
  modified_base (20)..(20): 2' O-methyl modified
  misc_feature (20)..(21): Phosphorothioate linkage
  modified_base (21)..(21): 2' O-methyl modified
uccucgaucucaggaggcauu

SEQ ID NO: 14261 - RNA, 21 nt, Artificial Sequence
  Description of Artificial Sequence: Synthetic oligonucleotide
  modified_base (1)..(1): 2' O-methyl modified
  misc_feature (1)..(2): Phosphorothioate linkage
  modified_base (2)..(2): 2' fluoro-modified
  misc_feature (2)..(3): Phosphorothioate linkage
  modified_base (3)..(3): 2' O-methyl modified
  modified_base (4)..(4): 2' fluoro-modified
  modified_base (5)..(5): 2' O-methyl modified
  modified_base (6)..(6): 2' fluoro-modified
  modified_base (7)..(7): 2' O-methyl modified
  modified_base (8)..(8): 2' fluoro-modified
  modified_base (9)..(9): 2' O-methyl modified
  modified_base (10)..(10): 2' fluoro-modified
  modified_base (11)..(11): 2' O-methyl modified
  modified_base (12)..(12): 2' O-methyl modified
  modified_base (13)..(13): 2' O-methyl modified
  modified_base (14)..(14): 2' fluoro-modified
  modified_base (15)..(15): 2' O-methyl modified
  modified_base (16)..(16): 2' fluoro-modified
  modified_base (17)..(17): 2' O-methyl modified
  modified_base (18)..(18): 2' fluoro-modified
  modified_base (19)..(19): 2' O-methyl modified
  misc_feature (19)..(20): Phosphorothioate linkage
  modified_base (20)..(20): 2' O-methyl modified
  misc_feature (20)..(21): Phosphorothioate linkage
  modified_base (21)..(21): 2' O-methyl modified
ugccucgaucucaggaggcuu

SEQ ID NO: 14262 - RNA, 21 nt, Artificial Sequence
  Description of Artificial Sequence: Synthetic oligonucleotide
  modified_base (1)..(1): 2' O-methyl modified
  misc_feature (1)..(2): Phosphorothioate linkage
  modified_base (2)..(2): 2' fluoro-modified
  misc_feature (2)..(3): Phosphorothioate linkage
  modified_base (3)..(3): 2' O-methyl modified
  modified_base (4)..(4): 2' fluoro-modified
  modified_base (5)..(5): 2' O-methyl modified
  modified_base (6)..(6): 2' fluoro-modified
  modified_base (7)..(7): 2' O-methyl modified
  modified_base (8)..(8): 2' fluoro-modified
  modified_base (9)..(9): 2' O-methyl modified
  modified_base (10)..(10): 2' fluoro-modified
  modified_base (11)..(11): 2' O-methyl modified
  modified_base (12)..(12): 2' O-methyl modified
  modified_base (13)..(13): 2' O-methyl modified
  modified_base (14)..(14): 2' fluoro-modified
  modified_base (15)..(15): 2' O-methyl modified
  modified_base (16)..(16): 2' fluoro-modified
  modified_base (17)..(17): 2' O-methyl modified
  modified_base (18)..(18): 2' fluoro-modified
  modified_base (19)..(19): 2' O-methyl modified
  misc_feature (19)..(20): Phosphorothioate linkage
  modified_base (20)..(20): 2' O-methyl modified
  misc_feature (20)..(21): Phosphorothioate linkage
  modified_base (21)..(21): 2' O-methyl modified
uagccucgaucucaggagguu

SEQ ID NO: 14263 - RNA, 21 nt, Artificial Sequence
  Description of Artificial Sequence: Synthetic oligonucleotide
  modified_base (1)..(1): 2' O-methyl modified
  misc_feature (1)..(2): Phosphorothioate linkage
  modified_base (2)..(2): 2' fluoro-modified
  misc_feature (2)..(3): Phosphorothioate linkage
  modified_base (3)..(3): 2' O-methyl modified
  modified_base (4)..(4): 2' fluoro-modified
  modified_base (5)..(5): 2' O-methyl modified
  modified_base (6)..(6): 2' fluoro-modified
  modified_base (7)..(7): 2' O-methyl modified
  modified_base (8)..(8): 2' fluoro-modified
  modified_base (9)..(9): 2' O-methyl modified
  modified_base (10)..(10): 2' fluoro-modified
  modified_base (11)..(11): 2' O-methyl modified
  modified_base (12)..(12): 2' O-methyl modified
  modified_base (13)..(13): 2' O-methyl modified
  modified_base (14)..(14): 2' fluoro-modified
  modified_base (15)..(15): 2' O-methyl modified
  modified_base (16)..(16): 2' fluoro-modified
  modified_base (17)..(17): 2' O-methyl modified
  modified_base (18)..(18): 2' fluoro-modified
  modified_base (19)..(19): 2' O-methyl modified
  misc_feature (19)..(20): Phosphorothioate linkage
  modified_base (20)..(20): 2' O-methyl modified
  misc_feature (20)..(21): Phosphorothioate linkage
  modified_base (21)..(21): 2' O-methyl modified
ucccuugguccacgccucuuu

SEQ ID NO: 14264 - RNA, 21 nt, Artificial Sequence
  Description of Artificial Sequence: Synthetic oligonucleotide
  modified_base (1)..(1): 2' O-methyl modified
  misc_feature (1)..(2): Phosphorothioate linkage
  modified_base (2)..(2): 2' fluoro-modified
  misc_feature (2)..(3): Phosphorothioate linkage
  modified_base (3)..(3): 2' O-methyl modified
  modified_base (4)..(4): 2' fluoro-modified
  modified_base (5)..(5): 2' O-methyl modified
  modified_base (6)..(6): 2' fluoro-modified
  modified_base (7)..(7): 2' O-methyl modified
  modified_base (8)..(8): 2' fluoro-modified
  modified_base (9)..(9): 2' O-methyl modified
  modified_base (10)..(10): 2' fluoro-modified
  modified_base (11)..(11): 2' O-methyl modified
  modified_base (12)..(12): 2' O-methyl modified
  modified_base (13)..(13): 2' O-methyl modified
  modified_base (14)..(14): 2' fluoro-modified
  modified_base (15)..(15): 2' O-methyl modified
  modified_base (16)..(16): 2' fluoro-modified
  modified_base (17)..(17): 2' O-methyl modified
  modified_base (18)..(18): 2' fluoro-modified
  modified_base (19)..(19): 2' O-methyl modified
  misc_feature (19)..(20): Phosphorothioate linkage
  modified_base (20)..(20): 2' O-methyl modified
  misc_feature (20)..(21): Phosphorothioate linkage
  modified_base (21)..(21): 2' O-methyl modified
uccccuugguccacgccucuu

SEQ ID NO: 14265 - RNA, 21 nt, Artificial Sequence
  Description of Artificial Sequence: Synthetic oligonucleotide
  modified_base (1)..(1): 2' O-methyl modified
  misc_feature (1)..(2): Phosphorothioate linkage
  modified_base (2)..(2): 2' fluoro-modified
  misc_feature (2)..(3): Phosphorothioate linkage
  modified_base (3)..(3): 2' O-methyl modified
  modified_base (4)..(4): 2' fluoro-modified
  modified_base (5)..(5): 2' O-methyl modified
  modified_base (6)..(6): 2' fluoro-modified
  modified_base (7)..(7): 2' O-methyl modified
  modified_base (8)..(8): 2' fluoro-modified
  modified_base (9)..(9): 2' O-methyl modified
  modified_base (10)..(10): 2' fluoro-modified
  modified_base (11)..(11): 2' O-methyl modified
  modified_base (12)..(12): 2' O-methyl modified
  modified_base (13)..(13): 2' O-methyl modified
  modified_base (14)..(14): 2' fluoro-modified
  modified_base (15)..(15): 2' O-methyl modified
  modified_base (16)..(16): 2' fluoro-modified
  modified_base (17)..(17): 2' O-methyl modified
  modified_base (18)..(18): 2' fluoro-modified
  modified_base (19)..(19): 2' O-methyl modified
  misc_feature (19)..(20): Phosphorothioate linkage
  modified_base (20)..(20): 2' O-methyl modified
  misc_feature (20)..(21): Phosphorothioate linkage
  modified_base (21)..(21): 2' O-methyl modified
uuccaugccccuugguccauu

SEQ ID NO: 14266 - RNA, 21 nt, Artificial Sequence
  Description of Artificial Sequence: Synthetic oligonucleotide
  modified_base (1)..(1): 2' O-methyl modified
  misc_feature (1)..(2): Phosphorothioate linkage
  modified_base (2)..(2): 2' fluoro-modified
  misc_feature (2)..(3): Phosphorothioate linkage
  modified_base (3)..(3): 2' O-methyl modified
  modified_base (4)..(4): 2' fluoro-modified
  modified_base (5)..(5): 2' O-methyl modified
  modified_base (6)..(6): 2' fluoro-modified
  modified_base (7)..(7): 2' O-methyl modified
  modified_base (8)..(8): 2' fluoro-modified
  modified_base (9)..(9): 2' O-methyl modified
  modified_base (10)..(10): 2' fluoro-modified
  modified_base (11)..(11): 2' O-methyl modified
  modified_base (12)..(12): 2' O-methyl modified
  modified_base (13)..(13): 2' O-methyl modified
  modified_base (14)..(14): 2' fluoro-modified
  modified_base (15)..(15): 2' O-methyl modified
  modified_base (16)..(16): 2' fluoro-modified
  modified_base (17)..(17): 2' O-methyl modified
  modified_base (18)..(18): 2' fluoro-modified
  modified_base (19)..(19): 2' O-methyl modified
  misc_feature (19)..(20): Phosphorothioate linkage
  modified_base (20)..(20): 2' O-methyl modified
  misc_feature (20)..(21): Phosphorothioate linkage
  modified_base (21)..(21): 2' O-methyl modified
uggggaccuacacacaacauu

SEQ ID NO: 14267 - RNA, 21 nt, Artificial Sequence
  Description of Artificial Sequence: Synthetic oligonucleotide
  modified_base (1)..(1): 2' O-methyl modified
  misc_feature (1)..(2): Phosphorothioate linkage
  modified_base (2)..(2): 2' fluoro-modified
  misc_feature (2)..(3): Phosphorothioate linkage
  modified_base (3)..(3): 2' O-methyl modified
  modified_base (4)..(4): 2' fluoro-modified
  modified_base (5)..(5): 2' O-methyl modified
  modified_base (6)..(6): 2' fluoro-modified
  modified_base (7)..(7): 2' O-methyl modified
  modified_base (8)..(8): 2' fluoro-modified
  modified_base (9)..(9): 2' O-methyl modified
  modified_base (10)..(10): 2' fluoro-modified
  modified_base (11)..(11): 2' O-methyl modified
  modified_base (12)..(12): 2' O-methyl modified
  modified_base (13)..(13): 2' O-methyl modified
  modified_base (14)..(14): 2' fluoro-modified
  modified_base (15)..(15): 2' O-methyl modified
  modified_base (16)..(16): 2' fluoro-modified
  modified_base (17)..(17): 2' O-methyl modified
  modified_base (18)..(18): 2' fluoro-modified
  modified_base (19)..(19): 2' O-methyl modified
  misc_feature (19)..(20): Phosphorothioate linkage
  modified_base (20)..(20): 2' O-methyl modified
  misc_feature (20)..(21): Phosphorothioate linkage
  modified_base (21)..(21): 2' O-methyl modified
ucccaggggaccuacacacuu

SEQ ID NO: 14268 - RNA, 21 nt, Artificial Sequence
  Description of Artificial Sequence: Synthetic oligonucleotide
  modified_base (1)..(1): 2' O-methyl modified
  misc_feature (1)..(2): Phosphorothioate linkage
  modified_base (2)..(2): 2' fluoro-modified
  misc_feature (2)..(3): Phosphorothioate linkage
  modified_base (3)..(3): 2' O-methyl modified
  modified_base (4)..(4): 2' fluoro-modified
  modified_base (5)..(5): 2' O-methyl modified
  modified_base (6)..(6): 2' fluoro-modified
  modified_base (7)..(7): 2' O-methyl modified
  modified_base (8)..(8): 2' fluoro-modified
  modified_base (9)..(9): 2' O-methyl modified
  modified_base (10)..(10): 2' fluoro-modified
  modified_base (11)..(11): 2' O-methyl modified
  modified_base (12)..(12): 2' O-methyl modified
  modified_base (13)..(13): 2' O-methyl modified
  modified_base (14)..(14): 2' fluoro-modified
  modified_base (15)..(15): 2' O-methyl modified
  modified_base (16)..(16): 2' fluoro-modified
  modified_base (17)..(17): 2' O-methyl modified
  modified_base (18)..(18): 2' fluoro-modified
  modified_base (19)..(19): 2' O-methyl modified
  misc_feature (19)..(20): Phosphorothioate linkage
  modified_base (20)..(20): 2' O-methyl modified
  misc_feature (20)..(21): Phosphorothioate linkage
  modified_base (21)..(21): 2' O-methyl modified
uguccccaggggaccuacauu

SEQ ID NO: 14269 - RNA, 21 nt, Artificial Sequence
  Description of Artificial Sequence: Synthetic oligonucleotide
  modified_base (1)..(1): 2' O-methyl modified
  misc_feature (1)..(2): Phosphorothioate linkage
  modified_base (2)..(2): 2' fluoro-modified
  misc_feature (2)..(3): Phosphorothioate linkage
  modified_base (3)..(3): 2' O-methyl modified
  modified_base (4)..(4): 2' O-methyl modified
  modified_base (5)..(5): 2' O-methyl modified
  modified_base (6)..(6): 2' fluoro-modified
  modified_base (7)..(7): 2' O-methyl modified
  modified_base (8)..(8): 2' O-methyl modified
  modified_base (9)..(9): 2' O-methyl modified
  modified_base (10)..(10): 2' O-methyl modified
  modified_base (11)..(11): 2' O-methyl modified
  modified_base (12)..(12): 2' O-methyl modified
  modified_base (13)..(13): 2' O-methyl modified
  modified_base (14)..(14): 2' fluoro-modified
  modified_base (15)..(15): 2' O-methyl modified
  modified_base (16)..(16): 2' fluoro-modified
  modified_base (17)..(17): 2' O-methyl modified
  modified_base (18)..(18): 2' O-methyl modified
  modified_base (19)..(19): 2' O-methyl modified
  misc_feature (19)..(20): Phosphorothioate linkage
  modified_base (20)..(20): 2' O-methyl modified
  misc_feature (20)..(21): Phosphorothioate linkage
  modified_base (21)..(21): 2' O-methyl modified
uggaaagaaucggaucacauu

SEQ ID NO: 14270 - RNA, 21 nt, Artificial Sequence
  Description of Artificial Sequence: Synthetic oligonucleotide
  modified_base (1)..(1): 2' O-methyl modified
  misc_feature (1)..(2): Phosphorothioate linkage
  modified_base (2)..(2): 2' fluoro-modified
  misc_feature (2)..(3): Phosphorothioate linkage
  modified_base (3)..(3): 2' O-methyl modified
  modified_base (4)..(4): 2' O-methyl modified
  modified_base (5)..(5): 2' O-methyl modified
  modified_base (6)..(6): 2' fluoro-modified
  modified_base (7)..(7): 2' O-methyl modified
  modified_base (8)..(8): 2' O-methyl modified
  modified_base (9)..(9): 2' O-methyl modified
  modified_base (10)..(10): 2' O-methyl modified
  modified_base (11)..(11): 2' O-methyl modified
  modified_base (12)..(12): 2' O-methyl modified
  modified_base (13)..(13): 2' O-methyl modified
  modified_base (14)..(14): 2' fluoro-modified
  modified_base (15)..(15): 2' O-methyl modified
  modified_base (16)..(16): 2' fluoro-modified
  modified_base (17)..(17): 2' O-methyl modified
  modified_base (18)..(18): 2' O-methyl modified
  modified_base (19)..(19): 2' O-methyl modified
  misc_feature (19)..(20): Phosphorothioate linkage
  modified_base (20)..(20): 2' O-methyl modified
  misc_feature (20)..(21): Phosphorothioate linkage
  modified_base (21)..(21): 2' O-methyl modified
ucagaugcugaauucgcaguu

SEQ ID NO: 14271 - RNA, 21 nt, Artificial Sequence
  Description of Artificial Sequence: Synthetic oligonucleotide
  modified_base (1)..(1): 2' O-methyl modified
  misc_feature (1)..(2): Phosphorothioate linkage
  modified_base (2)..(2): 2' fluoro-modified
  misc_feature (2)..(3): Phosphorothioate linkage
  modified_base (3)..(3): 2' O-methyl modified
  modified_base (4)..(4): 2' O-methyl modified
  modified_base (5)..(5): 2' O-methyl modified
  modified_base (6)..(6): 2' fluoro-modified
  modified_base (7)..(7): 2' O-methyl modified
  modified_base (8)..(8): 2' O-methyl modified
  modified_base (9)..(9): 2' O-methyl modified
  modified_base (10)..(10): 2' O-methyl modified
  modified_base (11)..(11): 2' O-methyl modified
  modified_base (12)..(12): 2' O-methyl modified
  modified_base (13)..(13): 2' O-methyl modified
  modified_base (14)..(14): 2' fluoro-modified
  modified_base (15)..(15): 2' O-methyl modified
  modified_base (16)..(16): 2' fluoro-modified
  modified_base (17)..(17): 2' O-methyl modified
  modified_base (18)..(18): 2' O-methyl modified
  modified_base (19)..(19): 2' O-methyl modified
  misc_feature (19)..(20): Phosphorothioate linkage
  modified_base (20)..(20): 2' O-methyl modified
  misc_feature (20)..(21): Phosphorothioate linkage
  modified_base (21)..(21): 2' O-methyl modified
ugcagaugcugaauucgcauu

SEQ ID NO: 14272 - RNA, 21 nt, Artificial Sequence
  Description of Artificial Sequence: Synthetic oligonucleotide
  modified_base (1)..(1): 2' O-methyl modified
  misc_feature (1)..(2): Phosphorothioate linkage
  modified_base (2)..(2): 2' fluoro-modified
  misc_feature (2)..(3): Phosphorothioate linkage
  modified_base (3)..(3): 2' O-methyl modified
  modified_base (4)..(4): 2' O-methyl modified
  modified_base (5)..(5): 2' O-methyl modified
  modified_base (6)..(6): 2' fluoro-modified
  modified_base (7)..(7): 2' O-methyl modified
  modified_base (8)..(8): 2' O-methyl modified
  modified_base (9)..(9): 2' O-methyl modified
  modified_base (10)..(10): 2' O-methyl modified
  modified_base (11)..(11): 2' O-methyl modified
  modified_base (12)..(12): 2' O-methyl modified
  modified_base (13)..(13): 2' O-methyl modified
  modified_base (14)..(14): 2' fluoro-modified
  modified_base (15)..(15): 2' O-methyl modified
  modified_base (16)..(16): 2' fluoro-modified
  modified_base (17)..(17): 2' O-methyl modified
  modified_base (18)..(18): 2' O-methyl modified
  modified_base (19)..(19): 2' O-methyl modified
  misc_feature (19)..(20): Phosphorothioate linkage
  modified_base (20)..(20): 2' O-methyl modified
  misc_feature (20)..(21): Phosphorothioate linkage
  modified_base (21)..(21): 2' O-methyl modified
uugcagaugcugaauucgcuu

SEQ ID NO: 14273 - RNA, 21 nt, Artificial Sequence
  Description of Artificial Sequence: Synthetic oligonucleotide
  modified_base (1)..(1): 2' O-methyl modified
  misc_feature (1)..(2): Phosphorothioate linkage
  modified_base (2)..(2): 2' fluoro-modified
  misc_feature (2)..(3): Phosphorothioate linkage
  modified_base (3)..(3): 2' O-methyl modified
  modified_base (4)..(4): 2' O-methyl modified
  modified_base (5)..(5): 2' O-methyl modified
  modified_base (6)..(6): 2' fluoro-modified
  modified_base (7)..(7): 2' O-methyl modified
  modified_base (8)..(8): 2' O-methyl modified
  modified_base (9)..(9): 2' O-methyl modified
  modified_base (10)..(10): 2' O-methyl modified
  modified_base (11)..(11): 2' O-methyl modified
  modified_base (12)..(12): 2' O-methyl modified
  modified_base (13)..(13): 2' O-methyl modified
  modified_base (14)..(14): 2' fluoro-modified
  modified_base (15)..(15): 2' O-methyl modified
  modified_base (16)..(16): 2' fluoro-modified
  modified_base (17)..(17): 2' O-methyl modified
  modified_base (18)..(18): 2' O-methyl modified
  modified_base (19)..(19): 2' O-methyl modified
  misc_feature (19)..(20): Phosphorothioate linkage
  modified_base (20)..(20): 2' O-methyl modified
  misc_feature (20)..(21): Phosphorothioate linkage
  modified_base (21)..(21): 2' O-methyl modified
uggaggccaaacuggcuuuuu

SEQ ID NO: 14274 - RNA, 21 nt, Artificial Sequence
  Description of Artificial Sequence: Synthetic oligonucleotide
  modified_base (1)..(1): 2' O-methyl modified
  misc_feature (1)..(2): Phosphorothioate linkage
  modified_base (2)..(2): 2' fluoro-modified
  misc_feature (2)..(3): Phosphorothioate linkage
  modified_base (3)..(3): 2' O-methyl modified
  modified_base (4)..(4): 2' O-methyl modified
  modified_base (5)..(5): 2' O-methyl modified
  modified_base (6)..(6): 2' fluoro-modified
  modified_base (7)..(7): 2' O-methyl modified
  modified_base (8)..(8): 2' O-methyl modified
  modified_base (9)..(9): 2' O-methyl modified
  modified_base (10)..(10): 2' O-methyl modified
  modified_base (11)..(11): 2' O-methyl modified
  modified_base (12)..(12): 2' O-methyl modified
  modified_base (13)..(13): 2' O-methyl modified
  modified_base (14)..(14): 2' fluoro-modified
  modified_base (15)..(15): 2' O-methyl modified
  modified_base (16)..(16): 2' fluoro-modified
  modified_base (17)..(17): 2' O-methyl modified
  modified_base (18)..(18): 2' O-methyl modified
  modified_base (19)..(19): 2' O-methyl modified
  misc_feature (19)..(20): Phosphorothioate linkage
  modified_base (20)..(20): 2' O-methyl modified
  misc_feature (20)..(21): Phosphorothioate linkage
  modified_base (21)..(21): 2' O-methyl modified
ucuaggugcuugugguccauu

SEQ ID NO: 14275 - RNA, 21 nt, Artificial Sequence
  Description of Artificial Sequence: Synthetic oligonucleotide
  modified_base (1)..(1): 2' O-methyl modified
  misc_feature (1)..(2): Phosphorothioate linkage
  modified_base (2)..(2): 2' fluoro-modified
  misc_feature (2)..(3): Phosphorothioate linkage
  modified_base (3)..(3): 2' O-methyl modified
  modified_base (4)..(4): 2' O-methyl modified
  modified_base (5)..(5): 2' O-methyl modified
  modified_base (6)..(6): 2' fluoro-modified
  modified_base (7)..(7): 2' O-methyl modified
  modified_base (8)..(8): 2' O-methyl modified
  modified_base (9)..(9): 2' O-methyl modified
  modified_base (10)..(10): 2' O-methyl modified
  modified_base (11)..(11): 2' O-methyl modified
  modified_base (12)..(12): 2' O-methyl modified
  modified_base (13)..(13): 2' O-methyl modified
  modified_base (14)..(14): 2' fluoro-modified
  modified_base (15)..(15): 2' O-methyl modified
  modified_base (16)..(16): 2' fluoro-modified
  modified_base (17)..(17): 2' O-methyl modified
  modified_base (18)..(18): 2' O-methyl modified
  modified_base (19)..(19): 2' O-methyl modified
  misc_feature (19)..(20): Phosphorothioate linkage
  modified_base (20)..(20): 2' O-methyl modified
  misc_feature (20)..(21): Phosphorothioate linkage
  modified_base (21)..(21): 2' O-methyl modified
uuucaaauaguccacucuguu

SEQ ID NO: 14276 - RNA, 21 nt, Artificial Sequence
  Description of Artificial Sequence: Synthetic oligonucleotide
  modified_base (1)..(1): 2' O-methyl modified
  misc_feature (1)..(2): Phosphorothioate linkage
  modified_base (2)..(2): 2' fluoro-modified
  misc_feature (2)..(3): Phosphorothioate linkage
  modified_base (3)..(3): 2' O-methyl modified
  modified_base (4)..(4): 2' O-methyl modified
  modified_base (5)..(5): 2' O-methyl modified
  modified_base (6)..(6): 2' fluoro-modified
  modified_base (7)..(7): 2' O-methyl modified
  modified_base (8)..(8): 2' O-methyl modified
  modified_base (9)..(9): 2' O-methyl modified
  modified_base (10)..(10): 2' O-methyl modified
  modified_base (11)..(11): 2' O-methyl modified
  modified_base (12)..(12): 2' O-methyl modified
  modified_base (13)..(13): 2' O-methyl modified
  modified_base (14)..(14): 2' fluoro-modified
  modified_base (15)..(15): 2' O-methyl modified
  modified_base (16)..(16): 2' fluoro-modified
  modified_base (17)..(17): 2' O-methyl modified
  modified_base (18)..(18): 2' O-methyl modified
  modified_base (19)..(19): 2' O-methyl modified
  misc_feature (19)..(20): Phosphorothioate linkage
  modified_base (20)..(20): 2' O-methyl modified
  misc_feature (20)..(21): Phosphorothioate linkage
  modified_base (21)..(21): 2' O-methyl modified
ucuugcaguucaccaaaaauu

SEQ ID NO: 14277 - RNA, 21 nt, Artificial Sequence
  Description of Artificial Sequence: Synthetic oligonucleotide
  modified_base (1)..(1): 2' O-methyl modified
  misc_feature (1)..(2): Phosphorothioate linkage
  modified_base (2)..(2): 2' fluoro-modified
  misc_feature (2)..(3): Phosphorothioate linkage
  modified_base (3)..(3): 2' O-methyl modified
  modified_base (4)..(4): 2' O-methyl modified
  modified_base (5)..(5): 2' O-methyl modified
  modified_base (6)..(6): 2' fluoro-modified
  modified_base (7)..(7): 2' O-methyl modified
  modified_base (8)..(8): 2' O-methyl modified
  modified_base (9)..(9): 2' O-methyl modified
  modified_base (10)..(10): 2' O-methyl modified
  modified_base (11)..(11): 2' O-methyl modified
  modified_base (12)..(12): 2' O-methyl modified
  modified_base (13)..(13): 2' O-methyl modified
  modified_base (14)..(14): 2' fluoro-modified
  modified_base (15)..(15): 2' O-methyl modified
  modified_base (16)..(16): 2' fluoro-modified
  modified_base (17)..(17): 2' O-methyl modified
  modified_base (18)..(18): 2' O-methyl modified
  modified_base (19)..(19): 2' O-methyl modified
  misc_feature (19)..(20): Phosphorothioate linkage
  modified_base (20)..(20): 2' O-methyl modified
  misc_feature (20)..(21): Phosphorothioate linkage
  modified_base (21)..(21): 2' O-methyl modified
uucuuaagcuucugccgcuuu

SEQ ID NO: 14278 - RNA, 21 nt, Artificial Sequence
  Description of Artificial Sequence: Synthetic oligonucleotide
  modified_base (1)..(1): 2' O-methyl modified
  misc_feature (1)..(2): Phosphorothioate linkage
  modified_base (2)..(2): 2' fluoro-modified
  misc_feature (2)..(3): Phosphorothioate linkage
  modified_base (3)..(3): 2' O-methyl modified
  modified_base (4)..(4): 2' O-methyl modified
  modified_base (5)..(5): 2' O-methyl modified
  modified_base (6)..(6): 2' fluoro-modified
  modified_base (7)..(7): 2' O-methyl modified
  modified_base (8)..(8): 2' O-methyl modified
  modified_base (9)..(9): 2' O-methyl modified
  modified_base (10)..(10): 2' O-methyl modified
  modified_base (11)..(11): 2' O-methyl modified
  modified_base (12)..(12): 2' O-methyl modified
  modified_base (13)..(13): 2' O-methyl modified
  modified_base (14)..(14): 2' fluoro-modified
  modified_base (15)..(15): 2' O-methyl modified
  modified_base (16)..(16): 2' fluoro-modified
  modified_base (17)..(17): 2' O-methyl modified
  modified_base (18)..(18): 2' O-methyl modified
  modified_base (19)..(19): 2' O-methyl modified
  misc_feature (19)..(20): Phosphorothioate linkage
  modified_base (20)..(20): 2' O-methyl modified
  misc_feature (20)..(21): Phosphorothioate linkage
  modified_base (21)..(21): 2' O-methyl modified
uagauucccuucuuaagcuuu

SEQ ID NO: 14279 - RNA, 21 nt, Artificial Sequence
  Description of Artificial Sequence: Synthetic oligonucleotide
  modified_base (1)..(1): 2' O-methyl modified
  misc_feature (1)..(2): Phosphorothioate linkage
  modified_base (2)..(2): 2' fluoro-modified
  misc_feature (2)..(3): Phosphorothioate linkage
  modified_base (3)..(3): 2' O-methyl modified
  modified_base (4)..(4): 2' O-methyl modified
  modified_base (5)..(5): 2' O-methyl modified
  modified_base (6)..(6): 2' fluoro-modified
  modified_base (7)..(7): 2' O-methyl modified
  modified_base (8)..(8): 2' O-methyl modified
  modified_base (9)..(9): 2' O-methyl modified
  modified_base (10)..(10): 2' O-methyl modified
  modified_base (11)..(11): 2' O-methyl modified
  modified_base (12)..(12): 2' O-methyl modified
  modified_base (13)..(13): 2' O-methyl modified
  modified_base (14)..(14): 2' fluoro-modified
  modified_base (15)..(15): 2' O-methyl modified
  modified_base (16)..(16): 2' fluoro-modified
  modified_base (17)..(17): 2' O-methyl modified
  modified_base (18)..(18): 2' O-methyl modified
  modified_base (19)..(19): 2' O-methyl modified
  misc_feature (19)..(20): Phosphorothioate linkage
  modified_base (20)..(20): 2' O-methyl modified
  misc_feature (20)..(21): Phosphorothioate linkage
  modified_base (21)..(21): 2' O-methyl modified
uacaaguuuccagauggccuu

SEQ ID NO: 14280 - RNA, 21 nt, Artificial Sequence
  Description of Artificial Sequence: Synthetic oligonucleotide
  modified_base (1)..(1): 2' O-methyl modified
  misc_feature (1)..(2): Phosphorothioate linkage
  modified_base (2)..(2): 2' fluoro-modified
  misc_feature (2)..(3): Phosphorothioate linkage
  modified_base (3)..(3): 2' O-methyl modified
  modified_base (4)..(4): 2' O-methyl modified
  modified_base (5)..(5): 2' O-methyl modified
  modified_base (6)..(6): 2' fluoro-modified
  modified_base (7)..(7): 2' O-methyl modified
  modified_base (8)..(8): 2' O-methyl modified
  modified_base (9)..(9): 2' O-methyl modified
  modified_base (10)..(10): 2' O-methyl modified
  modified_base (11)..(11): 2' O-methyl modified
  modified_base (12)..(12): 2' O-methyl modified
  modified_base (13)..(13): 2' O-methyl modified
  modified_base (14)..(14): 2' fluoro-modified
  modified_base (15)..(15): 2' O-methyl modified
  modified_base (16)..(16): 2' fluoro-modified
  modified_base (17)..(17): 2' O-methyl modified
  modified_base (18)..(18): 2' O-methyl modified
  modified_base (19)..(19): 2' O-methyl modified
  misc_feature (19)..(20): Phosphorothioate linkage
  modified_base (20)..(20): 2' O-methyl modified
  misc_feature (20)..(21): Phosphorothioate linkage
  modified_base (21)..(21): 2' O-methyl modified
ucacaaguuuccagauggcuu

SEQ ID NO: 14281 - RNA, 21 nt, Artificial Sequence
  Description of Artificial Sequence: Synthetic oligonucleotide
  modified_base (1)..(1): 2' O-methyl modified
  misc_feature (1)..(2): Phosphorothioate linkage
  modified_base (2)..(2): 2' fluoro-modified
  misc_feature (2)..(3): Phosphorothioate linkage
  modified_base (3)..(3): 2' O-methyl modified
  modified_base (4)..(4): 2' O-methyl modified
  modified_base (5)..(5): 2' O-methyl modified
  modified_base (6)..(6): 2' fluoro-modified
  modified_base (7)..(7): 2' O-methyl modified
  modified_base (8)..(8): 2' O-methyl modified
  modified_base (9)..(9): 2' O-methyl modified
  modified_base (10)..(10): 2' O-methyl modified
  modified_base (11)..(11): 2' O-methyl modified
  modified_base (12)..(12): 2' O-methyl modified
  modified_base (13)..(13): 2' O-methyl modified
  modified_base (14)..(14): 2' fluoro-modified
  modified_base (15)..(15): 2' O-methyl modified
  modified_base (16)..(16): 2' fluoro-modified
  modified_base (17)..(17): 2' O-methyl modified
  modified_base (18)..(18): 2' O-methyl modified
  modified_base (19)..(19): 2' O-methyl modified
  misc_feature (19)..(20): Phosphorothioate linkage
  modified_base (20)..(20): 2' O-methyl modified
  misc_feature (20)..(21): Phosphorothioate linkage
  modified_base (21)..(21): 2' O-methyl modified
uucucaggaggcaacgcauuu

SEQ ID NO: 14282 - RNA, 21 nt, Artificial Sequence
  Description of Artificial Sequence: Synthetic oligonucleotide
  modified_base (1)..(1): 2' O-methyl modified
  misc_feature (1)..(2): Phosphorothioate linkage
  modified_base (2)..(2): 2' fluoro-modified
  misc_feature (2)..(3): Phosphorothioate linkage
  modified_base (3)..(3): 2' O-methyl modified
  modified_base (4)..(4): 2' O-methyl modified
  modified_base (5)..(5): 2' O-methyl modified
  modified_base (6)..(6): 2' fluoro-modified
  modified_base (7)..(7): 2' O-methyl modified
  modified_base (8)..(8): 2' O-methyl modified
  modified_base (9)..(9): 2' O-methyl modified
  modified_base (10)..(10): 2' O-methyl modified
  modified_base (11)..(11): 2' O-methyl modified
  modified_base (12)..(12): 2' O-methyl modified
  modified_base (13)..(13): 2' O-methyl modified
  modified_base (14)..(14): 2' fluoro-modified
  modified_base (15)..(15): 2' O-methyl modified
  modified_base (16)..(16): 2' fluoro-modified
  modified_base (17)..(17): 2' O-methyl modified
  modified_base (18)..(18): 2' O-methyl modified
  modified_base (19)..(19): 2' O-methyl modified
  misc_feature (19)..(20): Phosphorothioate linkage
  modified_base (20)..(20): 2' O-methyl modified
  misc_feature (20)..(21): Phosphorothioate linkage
  modified_base (21)..(21): 2' O-methyl modified
uuauccugcagccucgaucuu

SEQ ID NO: 14283 - RNA, 21 nt, Artificial Sequence
  Description of Artificial Sequence: Synthetic oligonucleotide
  modified_base (1)..(1): 2' O-methyl modified
  misc_feature (1)..(2): Phosphorothioate linkage
  modified_base (2)..(2): 2' fluoro-modified
  misc_feature (2)..(3): Phosphorothioate linkage
  modified_base (3)..(3): 2' O-methyl modified
  modified_base (4)..(4): 2' O-methyl modified
  modified_base (5)..(5): 2' O-methyl modified
  modified_base (6)..(6): 2' fluoro-modified
  modified_base (7)..(7): 2' O-methyl modified
  modified_base (8)..(8): 2' O-methyl modified
  modified_base (9)..(9): 2' O-methyl modified
  modified_base (10)..(10): 2' O-methyl modified
  modified_base (11)..(11): 2' O-methyl modified
  modified_base (12)..(12): 2' O-methyl modified
  modified_base (13)..(13): 2' O-methyl modified
  modified_base (14)..(14): 2' fluoro-modified
  modified_base (15)..(15): 2' O-methyl modified
  modified_base (16)..(16): 2' fluoro-modified
  modified_base (17)..(17): 2' O-methyl modified
  modified_base (18)..(18): 2' O-methyl modified
  modified_base (19)..(19): 2' O-methyl modified
  misc_feature (19)..(20): Phosphorothioate linkage
  modified_base (20)..(20): 2' O-methyl modified
  misc_feature (20)..(21): Phosphorothioate linkage
  modified_base (21)..(21): 2' O-methyl modified
uauauccugcagccucgauuu

SEQ ID NO: 14284 - RNA, 21 nt, Artificial Sequence
  Description of Artificial Sequence: Synthetic oligonucleotide
  modified_base (1)..(1): 2' O-methyl modified
  misc_feature (1)..(2): Phosphorothioate linkage
  modified_base (2)..(2): 2' fluoro-modified
  misc_feature (2)..(3): Phosphorothioate linkage
  modified_base (3)..(3): 2' O-methyl modified
  modified_base (4)..(4): 2' O-methyl modified
  modified_base (5)..(5): 2' O-methyl modified
  modified_base (6)..(6): 2' fluoro-modified
  modified_base (7)..(7): 2' O-methyl modified
  modified_base (8)..(8): 2' O-methyl modified
  modified_base (9)..(9): 2' O-methyl modified
  modified_base (10)..(10): 2' O-methyl modified
  modified_base (11)..(11): 2' O-methyl modified
  modified_base (12)..(12): 2' O-methyl modified
  modified_base (13)..(13): 2' O-methyl modified
  modified_base (14)..(14): 2' fluoro-modified
  modified_base (15)..(15): 2' O-methyl modified
  modified_base (16)..(16): 2' fluoro-modified
  modified_base (17)..(17): 2' O-methyl modified
  modified_base (18)..(18): 2' O-methyl modified
  modified_base (19)..(19): 2' O-methyl modified
  misc_feature (19)..(20): Phosphorothioate linkage
  modified_base (20)..(20): 2' O-methyl modified
  misc_feature (20)..(21): Phosphorothioate linkage
  modified_base (21)..(21): 2' O-methyl modified
ugucugagcauauccugcauu

SEQ ID NO: 14285 - RNA, 21 nt, Artificial Sequence
  Description of Artificial Sequence: Synthetic oligonucleotide
  modified_base (1)..(1): 2' O-methyl modified
  misc_feature (1)..(2): Phosphorothioate linkage
  modified_base (2)..(2): 2' fluoro-modified
  misc_feature (2)..(3): Phosphorothioate linkage
  modified_base (3)..(3): 2' O-methyl modified
  modified_base (4)..(4): 2' O-methyl modified
  modified_base (5)..(5): 2' O-methyl modified
  modified_base (6)..(6): 2' fluoro-modified
  modified_base (7)..(7): 2' O-methyl modified
  modified_base (8)..(8): 2' O-methyl modified
  modified_base (9)..(9): 2' O-methyl modified
  modified_base (10)..(10): 2' O-methyl modified
  modified_base (11)..(11): 2' O-methyl modified
  modified_base (12)..(12): 2' O-methyl modified
  modified_base (13)..(13): 2' O-methyl modified
  modified_base (14)..(14): 2' fluoro-modified
  modified_base (15)..(15): 2' O-methyl modified
  modified_base (16)..(16): 2' fluoro-modified
  modified_base (17)..(17): 2' O-methyl modified
  modified_base (18)..(18): 2' O-methyl modified
  modified_base (19)..(19): 2' O-methyl modified
  misc_feature (19)..(20): Phosphorothioate linkage
  modified_base (20)..(20): 2' O-methyl modified
  misc_feature (20)..(21): Phosphorothioate linkage
  modified_base (21)..(21): 2' O-methyl modified
uccucuagagucugagcauuu

SEQ ID NO: 14286 - RNA, 21 nt, Artificial Sequence
  Description of Artificial Sequence: Synthetic oligonucleotide
  modified_base (1)..(1): 2' O-methyl modified
  misc_feature (1)..(2): Phosphorothioate linkage
  modified_base (2)..(2): 2' fluoro-modified
  misc_feature (2)..(3): Phosphorothioate linkage
  modified_base (3)..(3): 2' O-methyl modified
  modified_base (4)..(4): 2' O-methyl modified
  modified_base (5)..(5): 2' O-methyl modified
  modified_base (6)..(6): 2' fluoro-modified
  modified_base (7)..(7): 2' O-methyl modified
  modified_base (8)..(8): 2' O-methyl modified
  modified_base (9)..(9): 2' O-methyl modified
  modified_base (10)..(10): 2' O-methyl modified
  modified_base (11)..(11): 2' O-methyl modified
  modified_base (12)..(12): 2' O-methyl modified
  modified_base (13)..(13): 2' O-methyl modified
  modified_base (14)..(14): 2' fluoro-modified
  modified_base (15)..(15): 2' O-methyl modified
  modified_base (16)..(16): 2' fluoro-modified
  modified_base (17)..(17): 2' O-methyl modified
  modified_base (18)..(18): 2' O-methyl modified
  modified_base (19)..(19): 2' O-methyl modified
  misc_feature (19)..(20): Phosphorothioate linkage
  modified_base (20)..(20): 2' O-methyl modified
  misc_feature (20)..(21): Phosphorothioate linkage
  modified_base (21)..(21): 2' O-methyl modified
ugacugaguccgccauugauu

SEQ ID NO: 14287 - RNA, 21 nt, Artificial Sequence
  Description of Artificial Sequence: Synthetic oligonucleotide
  modified_base (1)..(1): 2' O-methyl modified
  misc_feature (1)..(2): Phosphorothioate linkage
  modified_base (2)..(2): 2' fluoro-modified
  misc_feature (2)..(3): Phosphorothioate linkage
  modified_base (3)..(3): 2' O-methyl modified
  modified_base (4)..(4): 2' O-methyl modified
  modified_base (5)..(5): 2' O-methyl modified
  modified_base (6)..(6): 2' fluoro-modified
  modified_base (7)..(7): 2' O-methyl modified
  modified_base (8)..(8): 2' O-methyl modified
  modified_base (9)..(9): 2' O-methyl modified
  modified_base (10)..(10): 2' O-methyl modified
  modified_base (11)..(11): 2' O-methyl modified
  modified_base (12)..(12): 2' O-methyl modified
  modified_base (13)..(13): 2' O-methyl modified
  modified_base (14)..(14): 2' fluoro-modified
  modified_base (15)..(15): 2' O-methyl modified
  modified_base (16)..(16): 2' fluoro-modified
  modified_base (17)..(17): 2' O-methyl modified
  modified_base (18)..(18): 2' O-methyl modified
  modified_base (19)..(19): 2' O-methyl modified
  misc_feature (19)..(20): Phosphorothioate linkage
  modified_base (20)..(20): 2' O-methyl modified
  misc_feature (20)..(21): Phosphorothioate linkage
  modified_base (21)..(21): 2' O-methyl modified
uuuuauuccaagaacucuguu

SEQ ID NO: 14288 - RNA, 21 nt, Artificial Sequence
  Description of Artificial Sequence: Synthetic oligonucleotide
  modified_base (1)..(1): 2' O-methyl modified
  misc_feature (1)..(2): Phosphorothioate linkage
  modified_base (2)..(2): 2' fluoro-modified
  misc_feature (2)..(3): Phosphorothioate linkage
  modified_base (3)..(3): 2' O-methyl modified
  modified_base (4)..(4): 2' O-methyl modified
  modified_base (5)..(5): 2' O-methyl modified
  modified_base (6)..(6): 2' fluoro-modified
  modified_base (7)..(7): 2' O-methyl modified
  modified_base (8)..(8): 2' O-methyl modified
  modified_base (9)..(9): 2' O-methyl modified
  modified_base (10)..(10): 2' O-methyl modified
  modified_base (11)..(11): 2' O-methyl modified
  modified_base (12)..(12): 2' O-methyl modified
  modified_base (13)..(13): 2' O-methyl modified
  modified_base (14)..(14): 2' fluoro-modified
  modified_base (15)..(15): 2' O-methyl modified
  modified_base (16)..(16): 2' fluoro-modified
  modified_base (17)..(17): 2' O-methyl modified
  modified_base (18)..(18): 2' O-methyl modified
  modified_base (19)..(19): 2' O-methyl modified
  misc_feature (19)..(20): Phosphorothioate linkage
  modified_base (20)..(20): 2' O-methyl modified
  misc_feature (20)..(21): Phosphorothioate linkage
  modified_base (21)..(21): 2' O-methyl modified
ucuuuuauuccaagaacucuu

SEQ ID NO: 14289 - RNA, 21 nt, Artificial Sequence
  Description of Artificial Sequence: Synthetic oligonucleotide
  modified_base (1)..(1): 2' O-methyl modified
  misc_feature (1)..(2): Phosphorothioate linkage
  modified_base (2)..(2): 2' O-methyl modified
  misc_feature (2)..(3): Phosphorothioate linkage
  modified_base (3)..(3): 2' O-methyl modified
  modified_base (4)..(4): 2' O-methyl modified
  modified_base (5)..(5): 2' fluoro-modified
  modified_base (6)..(6): 2' O-methyl modified
  modified_base (7)..(7): 2' fluoro-modified
  modified_base (8)..(8): 2' fluoro-modified
  modified_base (9)..(9): 2' fluoro-modified
  modified_base (10)..(10): 2' O-methyl modified
  modified_base (11)..(11): 2' O-methyl modified
  modified_base (12)..(12): 2' O-methyl modified
  modified_base (13)..(13): 2' O-methyl modified
  modified_base (14)..(14): 2' O-methyl modified
  modified_base (15)..(15): 2' O-methyl modified
  modified_base (16)..(16): 2' O-methyl modified
  modified_base (17)..(17): 2' O-methyl modified
  modified_base (18)..(18): 2' O-methyl modified
  modified_base (19)..(19): 2' O-methyl modified
  misc_feature (19)..(20): Phosphorothioate linkage
  modified_base (20)..(20): 2' O-methyl modified
  misc_feature (20)..(21): Phosphorothioate linkage
  modified_base (21)..(21): 2' O-methyl modified
ggacaauacuuccacucuauu

SEQ ID NO: 14290 - RNA, 21 nt, Artificial Sequence
  Description of Artificial Sequence: Synthetic oligonucleotide
  modified_base (1)..(1): 2' O-methyl modified
  misc_feature (1)..(2): Phosphorothioate linkage
  modified_base (2)..(2): 2' fluoro-modified
  misc_feature (2)..(3): Phosphorothioate linkage
  modified_base (3)..(3): 2' O-methyl modified
  modified_base (4)..(4): 2' O-methyl modified
  modified_base (5)..(5): 2' O-methyl modified
  modified_base (6)..(6): 2' fluoro-modified
  modified_base (7)..(7): 2' O-methyl modified
  modified_base (8)..(8): 2' O-methyl modified
  modified_base (9)..(9): 2' O-methyl modified
  modified_base (10)..(10): 2' O-methyl modified
  modified_base (11)..(11): 2' O-methyl modified
  modified_base (12)..(12): 2' O-methyl modified
  modified_base (13)..(13): 2' O-methyl modified
  modified_base (14)..(14): 2' fluoro-modified
  modified_base (15)..(15): 2' O-methyl modified
  modified_base (16)..(16): 2' fluoro-modified
  modified_base (17)..(17): 2' O-methyl modified
  modified_base (18)..(18): 2' O-methyl modified
  modified_base (19)..(19): 2' O-methyl modified
  misc_feature (19)..(20): Phosphorothioate linkage
  modified_base (20)..(20): 2' O-methyl modified
  misc_feature (20)..(21): Phosphorothioate linkage
  modified_base (21)..(21): 2' O-methyl modified
uagaguggaaguauuguccuu

SEQ ID NO: 14291 - RNA, 21 nt, Artificial Sequence
  Description of Artificial Sequence: Synthetic oligonucleotide
  modified_base (1)..(1): 2' O-methyl modified
  misc_feature (1)..(2): Phosphorothioate linkage
  modified_base (2)..(2): 2' O-methyl modified
  misc_feature (2)..(3): Phosphorothioate linkage
  modified_base (3)..(3): 2' O-methyl modified
  modified_base (4)..(4): 2' O-methyl modified
  modified_base (5)..(5): 2' fluoro-modified
  modified_base (6)..(6): 2' O-methyl modified
  modified_base (7)..(7): 2' fluoro-modified
  modified_base (8)..(8): 2' fluoro-modified
  modified_base (9)..(9): 2' fluoro-modified
  modified_base (10)..(10): 2' O-methyl modified
  modified_base (11)..(11): 2' O-methyl modified
  modified_base (12)..(12): 2' O-methyl modified
  modified_base (13)..(13): 2' O-methyl modified
  modified_base (14)..(14): 2' O-methyl modified
  modified_base (15)..(15): 2' O-methyl modified
  modified_base (16)..(16): 2' O-methyl modified
  modified_base (17)..(17): 2' O-methyl modified
  modified_base (18)..(18): 2' O-methyl modified
  modified_base (19)..(19): 2' O-methyl modified
  misc_feature (19)..(20): Phosphorothioate linkage
  modified_base (20)..(20): 2' O-methyl modified
  misc_feature (20)..(21): Phosphorothioate linkage
  modified_base (21)..(21): 2' O-methyl modified
agcagaaucugagaauacauu

SEQ ID NO: 14292 - RNA, 21 nt, Artificial Sequence
  Description of Artificial Sequence: Synthetic oligonucleotide
  modified_base (1)..(1): 2' O-methyl modified
  misc_feature (1)..(2): Phosphorothioate linkage
  modified_base (2)..(2): 2' fluoro-modified
  misc_feature (2)..(3): Phosphorothioate linkage
  modified_base (3)..(3): 2' O-methyl modified
  modified_base (4)..(4): 2' O-methyl modified
  modified_base (5)..(5): 2' O-methyl modified
  modified_base (6)..(6): 2' fluoro-modified
  modified_base (7)..(7): 2' O-methyl modified
  modified_base (8)..(8): 2' O-methyl modified
  modified_base (9)..(9): 2' O-methyl modified
  modified_base (10)..(10): 2' O-methyl modified
  modified_base (11)..(11): 2' O-methyl modified
  modified_base (12)..(12): 2' O-methyl modified
  modified_base (13)..(13): 2' O-methyl modified
  modified_base (14)..(14): 2' fluoro-modified
  modified_base (15)..(15): 2' O-methyl modified
  modified_base (16)..(16): 2' fluoro-modified
  modified_base (17)..(17): 2' O-methyl modified
  modified_base (18)..(18): 2' O-methyl modified
  modified_base (19)..(19): 2' O-methyl modified
  misc_feature (19)..(20): Phosphorothioate linkage
  modified_base (20)..(20): 2' O-methyl modified
  misc_feature (20)..(21): Phosphorothioate linkage
  modified_base (21)..(21): 2' O-methyl modified
uguauucucagauucugcuuu

SEQ ID NO: 14293 - RNA, 21 nt, Artificial Sequence
  Description of Artificial Sequence: Synthetic oligonucleotide
  modified_base (1)..(1): 2' O-methyl modified a, c, u, g, or other
  misc_feature (1)..(2): Phosphorothioate linkage
  modified_base (2)..(2): 2' O-methyl modified a, c, u, g, or other
  misc_feature (2)..(3): Phosphorothioate linkage
  modified_base (3)..(3): 2' O-methyl modified a, c, u, g, or other
  modified_base (4)..(4): 2' O-methyl modified a, c, u, g, or other
  modified_base (5)..(5): 2' fluoro-modified a, c, u, g, or other
  modified_base (6)..(6): 2' fluoro-modified a, c, u, g, or other
  modified_base (7)..(7): 2' fluoro-modified a, c, u, g, or other
  modified_base (8)..(8): 2' fluoro-modified a, c, u, g, or other
  modified_base (9)..(9): 2' fluoro-modified a, c, u, g, or other
  modified_base (10)..(10): 2' O-methyl modified a, c, u, g, or other
  modified_base (11)..(11): 2' O-methyl modified a, c, u, g, or other
  modified_base (12)..(12): 2' O-methyl modified a, c, u, g, or other
  modified_base (13)..(13): 2' O-methyl modified a, c, u, g, or other
  modified_base (14)..(14): 2' O-methyl modified a, c, u, g, or other
  modified_base (15)..(15): 2' O-methyl modified a, c, u, g, or other
  modified_base (16)..(16): 2' O-methyl modified a, c, u, g, or other
  modified_base (17)..(17): 2' O-methyl modified a, c, u, g, or other
  modified_base (18)..(18): 2' O-methyl modified a, c, u, g, or other
  modified_base (19)..(19): 2' O-methyl modified a, c, u, g, or other
  misc_feature (19)..(20): Phosphorothioate linkage
  modified_base (20)..(20): 2' O-methyl modified a, c, u, g, or other
  misc_feature (20)..(21): Phosphorothioate linkage
  modified_base (21)..(21): 2' O-methyl modified a, c, u, g, or other
nnnnnnnnnnnnnnnnnnnnn

SEQ ID NO: 14294 - RNA, 21 nt, Artificial Sequence
  Description of Artificial Sequence: Synthetic oligonucleotide
  modified_base (1)..(1): 2' O-methyl modified a, c, u, g, or other
  misc_feature (1)..(2): Phosphorothioate linkage
  modified_base (2)..(2): 2' O-methyl modified a, c, u, g, or other
  misc_feature (2)..(3): Phosphorothioate linkage
  modified_base (3)..(3): 2' O-methyl modified a, c, u, g, or other
  modified_base (4)..(4): 2' O-methyl modified a, c, u, g, or other
  modified_base (5)..(5): 2' O-methyl modified a, c, u, g, or other
  modified_base (6)..(6): 2' fluoro-modified a, c, u, g, or other
  modified_base (7)..(7): 2' fluoro-modified a, c, u, g, or other
  modified_base (8)..(8): 2' fluoro-modified a, c, u, g, or other
  modified_base (9)..(9): 2' fluoro-modified a, c, u, g, or other
  modified_base (10)..(10): 2' O-methyl modified a, c, u, g, or other
  modified_base (11)..(11): 2' O-methyl modified a, c, u, g, or other
  modified_base (12)..(12): 2' O-methyl modified a, c, u, g, or other
  modified_base (13)..(13): 2' O-methyl modified a, c, u, g, or other
  modified_base (14)..(14): 2' O-methyl modified a, c, u, g, or other
  modified_base (15)..(15): 2' O-methyl modified a, c, u, g, or other
  modified_base (16)..(16): 2' O-methyl modified a, c, u, g, or other
  modified_base (17)..(17): 2' O-methyl modified a, c, u, g, or other
  modified_base (18)..(18): 2' O-methyl modified a, c, u, g, or other
  modified_base (19)..(19): 2' O-methyl modified a, c, u, g, or other
  misc_feature (19)..(20): Phosphorothioate linkage
  modified_base (20)..(20): 2' O-methyl modified a, c, u, g, or other
  misc_feature (20)..(21): Phosphorothioate linkage
  modified_base (21)..(21): 2' O-methyl modified a, c, u, g, or other
nnnnnnnnnnnnnnnnnnnnn

SEQ ID NO: 14295 - RNA, 21 nt, Artificial Sequence
  Description of Artificial Sequence: Synthetic oligonucleotide
  modified_base (1)..(1): 2' O-methyl modified a, c, u, g, or other
  misc_feature (1)..(2): Phosphorothioate linkage
  modified_base (2)..(2): 2' O-methyl modified a, c, u, g, or other
  misc_feature (2)..(3): Phosphorothioate linkage
  modified_base (3)..(3): 2' O-methyl modified a, c, u, g, or other
  modified_base (4)..(4): 2' O-methyl modified a, c, u, g, or other
  modified_base (5)..(5): 2' O-methyl modified a, c, u, g, or other
  modified_base (6)..(6): 2' O-methyl modified a, c, u, g, or other
  modified_base (7)..(7): 2' fluoro-modified a, c, u, g, or other
  modified_base (8)..(8): 2' fluoro-modified a, c, u, g, or other
  modified_base (9)..(9): 2' fluoro-modified a, c, u, g, or other
  modified_base (10)..(10): 2' fluoro-modified a, c, u, g, or other
  modified_base (11)..(11): 2' O-methyl modified a, c, u, g, or other
  modified_base (12)..(12): 2' O-methyl modified a, c, u, g, or other
  modified_base (13)..(13): 2' O-methyl modified a, c, u, g, or other
  modified_base (14)..(14): 2' O-methyl modified a, c, u, g, or other
  modified_base (15)..(15): 2' O-methyl modified a, c, u, g, or other
  modified_base (16)..(16): 2' O-methyl modified a, c, u, g, or other
  modified_base (17)..(17): 2' O-methyl modified a, c, u, g, or other
  modified_base (18)..(18): 2' O-methyl modified a, c, u, g, or other
  modified_base (19)..(19): 2' O-methyl modified a, c, u, g, or other
  misc_feature (19)..(20): Phosphorothioate linkage
  modified_base (20)..(20): 2' O-methyl modified a, c, u, g, or other
  misc_feature (20)..(21): Phosphorothioate linkage
  modified_base (21)..(21): 2' O-methyl modified a, c, u, g, or other
nnnnnnnnnnnnnnnnnnnnn

SEQ ID NO: 14296 - RNA, 21 nt, Artificial Sequence
  Description of Artificial Sequence: Synthetic oligonucleotide
  modified_base (1)..(1): 2' O-methyl modified a, c, u, g, or other
  misc_feature (1)..(2): Phosphorothioate linkage
  modified_base (2)..(2): 2' fluoro-modified a, c, u, g, or other
  misc_feature (2)..(3): Phosphorothioate linkage
  modified_base (3)..(3): 2' O-methyl modified a, c, u, g, or other
  modified_base (4)..(4): 2' O-methyl modified a, c, u, g, or other
  modified_base (5)..(5): 2' O-methyl modified a, c, u, g, or other
  modified_base (6)..(6): 2' O-methyl modified a, c, u, g, or other
  modified_base (7)..(7): 2' O-methyl modified a, c, u, g, or other
  modified_base (8)..(8): 2' O-methyl modified a, c, u, g, or other
  modified_base (9)..(9): 2' O-methyl modified a, c, u, g, or other
  modified_base (10)..(10): 2' O-methyl modified a, c, u, g, or other
  modified_base (11)..(11): 2' O-methyl modified a, c, u, g, or other
  modified_base (12)..(12): 2' O-methyl modified a, c, u, g, or other
  modified_base (13)..(13): 2' O-methyl modified a, c, u, g, or other
  modified_base (14)..(14): 2' fluoro-modified a, c, u, g, or other
  modified_base (15)..(15): 2' O-methyl modified a, c, u, g, or other
  modified_base (16)..(16): 2' fluoro-modified a, c, u, g, or other
  modified_base (17)..(17): 2' O-methyl modified a, c, u, g, or other
  modified_base (18)..(18): 2' O-methyl modified a, c, u, g, or other
  modified_base (19)..(19): 2' O-methyl modified a, c, u, g, or other
  misc_feature (19)..(20): Phosphorothioate linkage
  modified_base (20)..(20): 2' O-methyl modified a, c, u, g, or other
  misc_feature (20)..(21): Phosphorothioate linkage
  modified_base (21)..(21): 2' O-methyl modified a, c, u, g, or other
nnnnnnnnnnnnnnnnnnnnn

SEQ ID NO: 14297 - RNA, 21 nt, Artificial Sequence
  Description of Artificial Sequence: Synthetic oligonucleotide
  modified_base (1)..(1): 2' O-methyl modified a, c, u, g, or other
  misc_feature (1)..(2): Phosphorothioate linkage
  modified_base (2)..(2): 2' fluoro-modified a, c, u, g, or other
  misc_feature (2)..(3): Phosphorothioate linkage
  modified_base (3)..(3): 2' O-methyl modified a, c, u, g, or other
  modified_base (4)..(4): 2' O-methyl modified a, c, u, g, or other
  modified_base (5)..(5): 2' O-methyl modified a, c, u, g, or other
  modified_base (6)..(6): 2' fluoro-modified a, c, u, g, or other
  modified_base (7)..(7): 2' O-methyl modified a, c, u, g, or other
  modified_base (8)..(8): 2' O-methyl modified a, c, u, g, or other
  modified_base (9)..(9): 2' fluoro-modified a, c, u, g, or other
  modified_base (10)..(10): 2' O-methyl modified a, c, u, g, or other
  modified_base (11)..(11): 2' O-methyl modified a, c, u, g, or other
  modified_base (12)..(12): 2' O-methyl modified a, c, u, g, or other
  modified_base (13)..(13): 2' O-methyl modified a, c, u, g, or other
  modified_base (14)..(14): 2' fluoro-modified a, c, u, g, or other
  modified_base (15)..(15): 2' O-methyl modified a, c, u, g, or other
  modified_base (16)..(16): 2' fluoro-modified a, c, u, g, or other
  modified_base (17)..(17): 2' O-methyl modified a, c, u, g, or other
  modified_base (18)..(18): 2' O-methyl modified a, c, u, g, or other
  modified_base (19)..(19): 2' O-methyl modified a, c, u, g, or other
  misc_feature (19)..(20): Phosphorothioate linkage
  modified_base (20)..(20): 2' O-methyl modified a, c, u, g, or other
  misc_feature (20)..(21): Phosphorothioate linkage
  modified_base (21)..(21): 2' O-methyl modified a, c, u, g, or other
nnnnnnnnnnnnnnnnnnnnn

SEQ ID NO: 14298 - RNA, 21 nt, Artificial Sequence
  Description of Artificial Sequence: Synthetic oligonucleotide
  modified_base (1)..(1): 2' O-methyl modified
  misc_feature (1)..(2): Phosphorothioate linkage
  modified_base (2)..(2): 2' fluoro-modified
  misc_feature (2)..(3): Phosphorothioate linkage
  modified_base (3)..(3): 2' O-methyl modified
  modified_base (4)..(4): 2' fluoro-modified
  modified_base (5)..(5): 2' O-methyl modified
  modified_base (6)..(6): 2' fluoro-modified
  modified_base (7)..(7): 2' O-methyl modified
  modified_base (8)..(8): 2' fluoro-modified
  modified_base (9)..(9): 2' O-methyl modified
  modified_base (10)..(10): 2' fluoro-modified
  modified_base (11)..(11): 2' O-methyl modified
  modified_base (12)..(12): 2' fluoro-modified
  modified_base (13)..(13): 2' O-methyl modified
  modified_base (14)..(14): 2' fluoro-modified
  modified_base (15)..(15): 2' O-methyl modified
  modified_base (16)..(16): 2' fluoro-modified
  modified_base (17)..(17): 2' O-methyl modified
  modified_base (18)..(18): 2' fluoro-modified
  modified_base (19)..(19): 2' O-methyl modified
  misc_feature (19)..(20): Phosphorothioate linkage
  modified_base (20)..(20): 2' O-methyl modified
  misc_feature (20)..(21): Phosphorothioate linkage
  modified_base (21)..(21): 2' O-methyl modified
uuuuauuccaagaacucuguu

SEQ ID NO: 14299 - RNA, 21 nt, Artificial Sequence
  Description of Artificial Sequence: Synthetic oligonucleotide
  modified_base (1)..(1): 2' O-methyl modified
  misc_feature (1)..(2): Phosphorothioate linkage
  modified_base (2)..(2): 2' O-methyl modified
  misc_feature (2)..(3): Phosphorothioate linkage
  modified_base (3)..(3): 2' O-methyl modified
  modified_base (4)..(4): 2' O-methyl modified
  modified_base (5)..(5): 2' O-methyl modified
  modified_base (6)..(6): 2' fluoro-modified
  modified_base (7)..(7): 2' fluoro-modified
  modified_base (8)..(8): 2' fluoro-modified
  modified_base (9)..(9): 2' fluoro-modified
  modified_base (10)..(10): 2' O-methyl modified
  modified_base (11)..(11): 2' O-methyl modified
  modified_base (12)..(12): 2' O-methyl modified
  modified_base (13)..(13): 2' O-methyl modified
  modified_base (14)..(14): 2' O-methyl modified
  modified_base (15)..(15): 2' O-methyl modified
  modified_base (16)..(16): 2' O-methyl modified
  modified_base (17)..(17): 2' O-methyl modified
  modified_base (18)..(18): 2' O-methyl modified
  modified_base (19)..(19): 2' O-methyl modified
  misc_feature (19)..(20): Phosphorothioate linkage
  modified_base (20)..(20): 2' O-methyl modified
  misc_feature (20)..(21): Phosphorothioate linkage
  modified_base (21)..(21): 2' O-methyl modified
cagaguucuuggaauaaaauu

SEQ ID NO: 14300 - RNA, 21 nt, Artificial Sequence
  Description of Artificial Sequence: Synthetic oligonucleotide
  5' Phosphorothioate linkage
  modified_base (1)..(1): 2' O-methyl modified
  modified_base (2)..(2): 2' O-methyl modified
  modified_base (3)..(3): 2' O-methyl modified
  modified_base (4)..(4): 2' O-methyl modified
  modified_base (5)..(5): 2' fluoro-modified
  modified_base (6)..(6): 2' fluoro-modified
  modified_base (7)..(7): 2' O-methyl modified
  modified_base (8)..(8): 2' fluoro-modified
  modified_base (9)..(9): 2' fluoro-modified
  modified_base (10)..(10): 2' O-methyl modified
  modified_base (11)..(11): 2' O-methyl modified
  modified_base (12)..(12): 2' O-methyl modified
  modified_base (13)..(13): 2' O-methyl modified
  modified_base (14)..(14): 2' O-methyl modified
  modified_base (15)..(15): 2' O-methyl modified
  modified_base (16)..(16): 2' O-methyl modified
  modified_base (17)..(17): 2' O-methyl modified
  modified_base (18)..(18): 2' O-methyl modified
  modified_base (19)..(19): 2' O-methyl modified
  misc_feature (19)..(20): Phosphorothioate linkage
  modified_base (20)..(20): 2' O-methyl modified
  misc_feature (20)..(21): Phosphorothioate linkage
  modified_base (21)..(21): 2' O-methyl modified
ggacaguaauucagaggcauu

SEQ ID NO: 14301 - RNA, 21 nt, Artificial Sequence
  Description of Artificial Sequence: Synthetic oligonucleotide
  5' Phosphorothioate linkage
  modified_base (1)..(1): 2' O-methyl modified
  modified_base (2)..(2): 2' O-methyl modified
  modified_base (3)..(3): 2' O-methyl modified
  modified_base (4)..(4): 2' O-methyl modified
  modified_base (5)..(5): 2' fluoro-modified
  modified_base (6)..(6): 2' fluoro-modified
  modified_base (7)..(7): 2' O-methyl modified
  modified_base (8)..(8): 2' fluoro-modified
  modified_base (9)..(9): 2' fluoro-modified
  modified_base (10)..(10): 2' O-methyl modified
  modified_base (11)..(11): 2' fluoro-modified
  modified_base (12)..(12): 2' O-methyl modified
  modified_base (13)..(13): 2' O-methyl modified
  modified_base (14)..(14): 2' O-methyl modified
  modified_base (15)..(15): 2' O-methyl modified
  modified_base (16)..(16): 2' O-methyl modified
  modified_base (17)..(17): 2' O-methyl modified
  modified_base (18)..(18): 2' O-methyl modified
  modified_base (19)..(19): 2' O-methyl modified
  misc_feature (19)..(20): Phosphorothioate linkage
  modified_base (20)..(20): 2' O-methyl modified
  misc_feature (20)..(21): Phosphorothioate linkage
  modified_base (21)..(21): 2' O-methyl modified
uggagaaggugcauagcaauu

SEQ ID NO: 14302 - RNA, 21 nt, Artificial Sequence
  Description of Artificial Sequence: Synthetic oligonucleotide
  5' Phosphorothioate linkage
  modified_base (1)..(1): 2' O-methyl modified
  modified_base (2)..(2): 2' O-methyl modified
  modified_base (3)..(3): 2' O-methyl modified
  modified_base (4)..(4): 2' O-methyl modified
  modified_base (5)..(5): 2' O-methyl modified
  modified_base (6)..(6): 2' O-methyl modified
  modified_base (7)..(7): 2' fluoro-modified
  modified_base (8)..(8): 2' O-methyl modified
  modified_base (9)..(9): 2' fluoro-modified
  modified_base (10)..(10): 2' O-methyl modified
  modified_base (11)..(11): 2' O-methyl modified
  modified_base (12)..(12): 2' O-methyl modified
  modified_base (13)..(13): 2' O-methyl modified
  modified_base (14)..(14): 2' O-methyl modified
  modified_base (15)..(15): 2' O-methyl modified
  modified_base (16)..(16): 2' O-methyl modified
  modified_base (17)..(17): 2' O-methyl modified
  modified_base (18)..(18): 2' O-methyl modified
  modified_base (19)..(19): 2' O-methyl modified
  misc_feature (19)..(20): Phosphorothioate linkage
  modified_base (20)..(20): 2' O-methyl modified
  misc_feature (20)..(21): Phosphorothioate linkage
  modified_base (21)..(21): 2' O-methyl modified
accaccauguugauccagauu

SEQ ID NO: 14303 - RNA, 21 nt, Artificial Sequence
  Description of Artificial Sequence: Synthetic oligonucleotide
  5' Phosphorothioate linkage
  modified_base (1)..(1): 2' O-methyl modified
  modified_base (2)..(2): 2' O-methyl modified
  modified_base (3)..(3): 2' O-methyl modified
  modified_base (4)..(4): 2' O-methyl modified
  modified_base (5)..(5): 2' O-methyl modified
  modified_base (6)..(6): 2' fluoro-modified
  modified_base (7)..(7): 2' fluoro-modified
  modified_base (8)..(8): 2' O-methyl modified
  modified_base (9)..(9): 2' fluoro-modified
  modified_base (10)..(10): 2' O-methyl modified
  modified_base (11)..(11): 2' fluoro-modified
  modified_base (12)..(12): 2' O-methyl modified
  modified_base (13)..(13): 2' O-methyl modified
  modified_base (14)..(14): 2' O-methyl modified
  modified_base (15)..(15): 2' O-methyl modified
  modified_base (16)..(16): 2' O-methyl modified
  modified_base (17)..(17): 2' O-methyl modified
  modified_base (18)..(18): 2' O-methyl modified
  modified_base (19)..(19): 2' O-methyl modified
  misc_feature (19)..(20): Phosphorothioate linkage
  modified_base (20)..(20): 2' O-methyl modified
  misc_feature (20)..(21): Phosphorothioate linkage
  modified_base (21)..(21): 2' O-methyl modified
ugcuguuguguguaggucauu

SEQ ID NO: 14304 - RNA, 21 nt, Artificial Sequence
  Description of Artificial Sequence: Synthetic oligonucleotide
  modified_base (1)..(1): 2' O-methyl modified
  misc_feature (1)..(2): Phosphorothioate linkage
  modified_base (2)..(2): 2' fluoro-modified
  misc_feature (2)..(3): Phosphorothioate linkage
  modified_base (3)..(3): 2' O-methyl modified
  modified_base (4)..(4): 2' fluoro-modified
  modified_base (5)..(5): 2' O-methyl modified
  modified_base (6)..(6): 2' fluoro-modified
  modified_base (7)..(7): 2' O-methyl modified
  modified_base (8)..(8): 2' fluoro-modified
  modified_base (9)..(9): 2' O-methyl modified
  modified_base (10)..(10): 2' fluoro-modified
  modified_base (11)..(11): 2' O-methyl modified
  modified_base (12)..(12): 2' fluoro-modified
  modified_base (13)..(13): 2' O-methyl modified
  modified_base (14)..(14): 2' fluoro-modified
  modified_base (15)..(15): 2' O-methyl modified
  modified_base (16)..(16): 2' fluoro-modified
  modified_base (17)..(17): 2' O-methyl modified
  modified_base (18)..(18): 2' fluoro-modified
  modified_base (19)..(19): 2' O-methyl modified
  misc_feature (19)..(20): Phosphorothioate linkage
  modified_base (20)..(20): 2' O-methyl modified
  misc_feature (20)..(21): Phosphorothioate linkage
  modified_base (21)..(21): 2' O-methyl modified
ugccucugaauuacuguccuu

SEQ ID NO: 14305 - RNA, 21 nt, Artificial Sequence
  Description of Artificial Sequence: Synthetic oligonucleotide
  modified_base (1)..(1): 2' O-methyl modified
  misc_feature (1)..(2): Phosphorothioate linkage
  modified_base (2)..(2): 2' fluoro-modified
  misc_feature (2)..(3): Phosphorothioate linkage
  modified_base (3)..(3): 2' O-methyl modified
  modified_base (4)..(4): 2' fluoro-modified
  modified_base (5)..(5): 2' O-methyl modified
  modified_base (6)..(6): 2' fluoro-modified
  modified_base (7)..(7): 2' O-methyl modified
  modified_base (8)..(8): 2' fluoro-modified
  modified_base (9)..(9): 2' O-methyl modified
  modified_base (10)..(10): 2' fluoro-modified
  modified_base (11)..(11): 2' O-methyl modified
  modified_base (12)..(12): 2' fluoro-modified
  modified_base (13)..(13): 2' O-methyl modified
  modified_base (14)..(14): 2' fluoro-modified
  modified_base (15)..(15): 2' O-methyl modified
  modified_base (16)..(16): 2' fluoro-modified
  modified_base (17)..(17): 2' O-methyl modified
  modified_base (18)..(18): 2' fluoro-modified
  modified_base (19)..(19): 2' O-methyl modified
  misc_feature (19)..(20): Phosphorothioate linkage
  modified_base (20)..(20): 2' O-methyl modified
  misc_feature (20)..(21): Phosphorothioate linkage
  modified_base (21)..(21): 2' O-methyl modified
uugcuaugcaccuucuccauu

SEQ ID NO: 14306 - RNA, 21 nt, Artificial Sequence
  Description of Artificial Sequence: Synthetic oligonucleotide
  modified_base (1)..(1): 2' O-methyl modified
  misc_feature (1)..(2): Phosphorothioate linkage
  modified_base (2)..(2): 2' fluoro-modified
  misc_feature (2)..(3): Phosphorothioate linkage
  modified_base (3)..(3): 2' O-methyl modified
  modified_base (4)..(4): 2' fluoro-modified
  modified_base (5)..(5): 2' O-methyl modified
  modified_base (6)..(6): 2' fluoro-modified
  modified_base (7)..(7): 2' O-methyl modified
  modified_base (8)..(8): 2' fluoro-modified
  modified_base (9)..(9): 2' O-methyl modified
  modified_base (10)..(10): 2' fluoro-modified
  modified_base (11)..(11): 2' O-methyl modified
  modified_base (12)..(12): 2' fluoro-modified
  modified_base (13)..(13): 2' O-methyl modified
  modified_base (14)..(14): 2' fluoro-modified
  modified_base (15)..(15): 2' O-methyl modified
  modified_base (16)..(16): 2' fluoro-modified
  modified_base (17)..(17): 2' O-methyl modified
  modified_base (18)..(18): 2' fluoro-modified
  modified_base (19)..(19): 2' O-methyl modified
  misc_feature (19)..(20): Phosphorothioate linkage
  modified_base (20)..(20): 2' O-methyl modified
  misc_feature (20)..(21): Phosphorothioate linkage
  modified_base (21)..(21): 2' O-methyl modified
ucuggaucaacauggugguuu

SEQ ID NO: 14307 - RNA, 21 nt, Artificial Sequence
  Description of Artificial Sequence: Synthetic oligonucleotide
  modified_base (1)..(1): 2' O-methyl modified
  misc_feature (1)..(2): Phosphorothioate linkage
  modified_base (2)..(2): 2' fluoro-modified
  misc_feature (2)..(3): Phosphorothioate linkage
  modified_base (3)..(3): 2' O-methyl modified
  modified_base (4)..(4): 2' fluoro-modified
  modified_base (5)..(5): 2' O-methyl modified
  modified_base (6)..(6): 2' fluoro-modified
  modified_base (7)..(7): 2' O-methyl modified
  modified_base (8)..(8): 2' fluoro-modified
  modified_base (9)..(9): 2' O-methyl modified
  modified_base (10)..(10): 2' fluoro-modified
  modified_base (11)..(11): 2' O-methyl modified
  modified_base (12)..(12): 2' fluoro-modified
  modified_base (13)..(13): 2' O-methyl modified
  modified_base (14)..(14): 2' fluoro-modified
  modified_base (15)..(15): 2' O-methyl modified
  modified_base (16)..(16): 2' fluoro-modified
  modified_base (17)..(17): 2' O-methyl modified
  modified_base (18)..(18): 2' fluoro-modified
  modified_base (19)..(19): 2' O-methyl modified
  misc_feature (19)..(20): Phosphorothioate linkage
  modified_base (20)..(20): 2' O-methyl modified
  misc_feature (20)..(21): Phosphorothioate linkage
  modified_base (21)..(21): 2' O-methyl modified
ugaccuacacacaacagcauu

SEQ ID NO: 14308 - RNA, 21 nt, Artificial Sequence
  Description of Artificial Sequence: Synthetic oligonucleotide
  5' Phosphorothioate linkage
  modified_base (1)..(1): 2' O-methyl modified
  modified_base (2)..(2): 2' O-methyl modified
  modified_base (3)..(3): 2' O-methyl modified
  modified_base (4)..(4): 2' O-methyl modified
  modified_base (5)..(5): 2' O-methyl modified
  modified_base (6)..(6): 2' fluoro-modified
  modified_base (7)..(7): 2' fluoro-modified
  modified_base (8)..(8): 2' fluoro-modified
  modified_base (9)..(9): 2' fluoro-modified
  modified_base (10)..(10): 2' O-methyl modified
  modified_base (11)..(11): 2' O-methyl modified
  modified_base (12)..(12): 2' O-methyl modified
  modified_base (13)..(13): 2' O-methyl modified
  modified_base (14)..(14): 2' O-methyl modified
  modified_base (15)..(15): 2' O-methyl modified
  modified_base (16)..(16): 2' O-methyl modified
  modified_base (17)..(17): 2' O-methyl modified
  modified_base (18)..(18): 2' O-methyl modified
  modified_base (19)..(19): 2' O-methyl modified
  misc_feature (19)..(20): Phosphorothioate linkage
  modified_base (20)..(20): 2' O-methyl modified
  misc_feature (20)..(21): Phosphorothioate linkage
  modified_base (21)..(21): 2' O-methyl modified
cagaguucuuggaauaaaauu

SEQ ID NO: 14309 - RNA, 21 nt, Artificial Sequence
  Description of Artificial Sequence: Synthetic oligonucleotide
  5' Phosphorothioate linkage
  modified_base (1)..(1): 2' O-methyl modified
  modified_base (2)..(2): 2' O-methyl modified
  modified_base (3)..(3): 2' O-methyl modified
  modified_base (4)..(4): 2' O-methyl modified
  modified_base (5)..(5): 2' O-methyl modified
  modified_base (6)..(6): 2' fluoro-modified
  modified_base (7)..(7): 2' fluoro-modified
  modified_base (8)..(8): 2' fluoro-modified
  modified_base (9)..(9): 2' fluoro-modified
  modified_base (10)..(10): 2' O-methyl modified
  modified_base (11)..(11): 2' O-methyl modified
  modified_base (12)..(12): 2' O-methyl modified
  modified_base (13)..(13): 2' O-methyl modified
  modified_base (14)..(14): 2' O-methyl modified
  modified_base (15)..(15): 2' O-methyl modified
  modified_base (16)..(16): 2' O-methyl modified
  modified_base (17)..(17): 2' O-methyl modified
  modified_base (18)..(18): 2' O-methyl modified
  modified_base (19)..(19): 2' O-methyl modified
  misc_feature (19)..(20): Phosphorothioate linkage
  modified_base (20)..(20): 2' O-methyl modified
  misc_feature (20)..(21): Phosphorothioate linkage
  modified_base (21)..(21): 2' O-methyl modified
cagaguucuuggaauaaaauu

SEQ ID NO: 14310 - RNA, 21 nt, Artificial Sequence
  Description of Artificial Sequence: Synthetic oligonucleotide
  5' Phosphorothioate linkage
  modified_base (1)..(1): 2' O-methyl modified
  modified_base (2)..(2): 2' O-methyl modified
  modified_base (3)..(3): 2' O-methyl modified
  modified_base (4)..(4): 2' O-methyl modified
  modified_base (5)..(5): 2' O-methyl modified
  modified_base (6)..(6): 2' fluoro-modified
  modified_base (7)..(7): 2' fluoro-modified
  modified_base (8)..(8): 2' fluoro-modified
  modified_base (9)..(9): 2' fluoro-modified
  modified_base (10)..(10): 2' O-methyl modified
  modified_base (11)..(11): 2' O-methyl modified
  modified_base (12)..(12): 2' O-methyl modified
  modified_base (13)..(13): 2' O-methyl modified
  modified_base (14)..(14): 2' O-methyl modified
  modified_base (15)..(15): 2' O-methyl modified
  modified_base (16)..(16): 2' O-methyl modified
  modified_base (17)..(17): 2' O-methyl modified
  modified_base (18)..(18): 2' O-methyl modified
  modified_base (19)..(19): 2' O-methyl modified
  misc_feature (19)..(20): Phosphorothioate linkage
  modified_base (20)..(20): 2' O-methyl modified
  misc_feature (20)..(21): Phosphorothioate linkage
  modified_base (21)..(21): 2' O-methyl modified
cagaguucuuggaauaaaauu

SEQ ID NO: 14311 - RNA, 21 nt, Artificial Sequence
  Description of Artificial Sequence: Synthetic oligonucleotide
  5' Phosphorothioate linkage
  modified_base (1)..(1): 2' O-methyl modified
  modified_base (2)..(2): 2' O-methyl modified
  modified_base (3)..(3): 2' O-methyl modified
  modified_base (4)..(4): 2' O-methyl modified
  modified_base (5)..(5): 2' O-methyl modified
  modified_base (6)..(6): 2' fluoro-modified
  modified_base (7)..(7): 2' fluoro-modified
  modified_base (8)..(8): 2' fluoro-modified
  modified_base (9)..(9): 2' fluoro-modified
  modified_base (10)..(10): 2' O-methyl modified
  modified_base (11)..(11): 2' O-methyl modified
  modified_base (12)..(12): 2' O-methyl modified
  modified_base (13)..(13): 2' O-methyl modified
  modified_base (14)..(14): 2' O-methyl modified
  modified_base (15)..(15): 2' O-methyl modified
  modified_base (16)..(16): 2' O-methyl modified
  modified_base (17)..(17): 2' O-methyl modified
  modified_base (18)..(18): 2' O-methyl modified
  modified_base (19)..(19): 2' O-methyl modified
  misc_feature (19)..(20): Phosphorothioate linkage
  modified_base (20)..(20): 2' O-methyl modified
  misc_feature (20)..(21): Phosphorothioate linkage
  modified_base (21)..(21): 2' O-methyl modified
cagaguucuuggaauaaaauu

SEQ ID NO: 14312 - RNA, 21 nt, Artificial Sequence
  Description of Artificial Sequence: Synthetic oligonucleotide
  5' Phosphorothioate linkage
  modified_base (1)..(1): 2' O-methyl modified
  modified_base (2)..(2): 2' O-methyl modified
  modified_base (3)..(3): 2' O-methyl modified
  modified_base (4)..(4): 2' O-methyl modified
  modified_base (5)..(5): 2' O-methyl modified
  modified_base (6)..(6): 2' fluoro-modified
  modified_base (7)..(7): 2' fluoro-modified
  modified_base (8)..(8): 2' fluoro-modified
  modified_base (9)..(9): 2' fluoro-modified
  modified_base (10)..(10): 2' O-methyl modified
  modified_base (11)..(11): 2' O-methyl modified
  modified_base (12)..(12): 2' O-methyl modified
  modified_base (13)..(13): 2' O-methyl modified
  modified_base (14)..(14): 2' O-methyl modified
  modified_base (15)..(15): 2' O-methyl modified
  modified_base (16)..(16): 2' O-methyl modified
  modified_base (17)..(17): 2' O-methyl modified
  modified_base (18)..(18): 2' O-methyl modified
  modified_base (19)..(19): 2' O-methyl modified
  misc_feature (19)..(20): Phosphorothioate linkage
  modified_base (20)..(20): 2' O-methyl modified
  misc_feature (20)..(21): Phosphorothioate linkage
  modified_base (21)..(21): 2' O-methyl modified
cagaguucuuggaauaaaauu

SEQ ID NO: 14313 - RNA, 21 nt, Artificial Sequence
  Description of Artificial Sequence: Synthetic oligonucleotide
  5' Phosphorothioate linkage
  modified_base (1)..(1): 2' O-methyl modified
  modified_base (2)..(2): 2' O-methyl modified
  modified_base (3)..(3): 2' O-methyl modified
  modified_base (4)..(4): 2' O-methyl modified
  modified_base (5)..(5): 2' O-methyl modified
  modified_base (6)..(6): 2' fluoro-modified
  modified_base (7)..(7): 2' fluoro-modified
  modified_base (8)..(8): 2' fluoro-modified
  modified_base (9)..(9): 2' fluoro-modified
  modified_base (10)..(10): 2' O-methyl modified
  modified_base (11)..(11): 2' deoxy-modified
  modified_base (12)..(12): 2' O-methyl modified
  modified_base (13)..(13): 2' O-methyl modified
  modified_base (14)..(14): 2' O-methyl modified
  modified_base (15)..(15): 2' O-methyl modified
  modified_base (16)..(16): 2' O-methyl modified
  modified_base (17)..(17): 2' O-methyl modified
  modified_base (18)..(18): 2' O-methyl modified
  modified_base (19)..(19): 2' O-methyl modified
  misc_feature (19)..(20): Phosphorothioate linkage
  modified_base (20)..(20): 2' O-methyl modified
  misc_feature (20)..(21): Phosphorothioate linkage
  modified_base (21)..(21): 2' O-methyl modified
cagaguucuuggaauaaaauu

SEQ ID NO: 14314 - RNA, 21 nt, Artificial Sequence
  Description of Artificial Sequence: Synthetic oligonucleotide
  5' Phosphorothioate linkage
  modified_base (1)..(1): 2' O-methyl modified
  modified_base (2)..(2): 2' O-methyl modified
  modified_base (3)..(3): 2' fluoro-modified
  modified_base (4)..(4): 2' O-methyl modified
  modified_base (5)..(5): 2' fluoro-modified
  modified_base (6)..(6): 2' O-methyl modified
  modified_base (7)..(7): 2' fluoro-modified
  modified_base (8)..(8): 2' O-methyl modified
  modified_base (9)..(9): 2' deoxy-modified
  modified_base (10)..(10): 2' O-methyl modified
  modified_base (11)..(11): 2' O-methyl modified
  modified_base (12)..(12): 2' O-methyl modified
  modified_base (13)..(13): 2' O-methyl modified
  modified_base (14)..(14): 2' O-methyl modified
  modified_base (15)..(15): 2' O-methyl modified
  modified_base (16)..(16): 2' O-methyl modified
  modified_base (17)..(17): 2' O-methyl modified
  modified_base (18)..(18): 2' O-methyl modified
  modified_base (19)..(19): 2' O-methyl modified
  misc_feature (19)..(20): Phosphorothioate linkage
  modified_base (20)..(20): 2' O-methyl modified
  misc_feature (20)..(21): Phosphorothioate linkage
  modified_base (21)..(21): 2' O-methyl modified
uaugcucagacucuagagauu

SEQ ID NO: 14315 - RNA, 21 nt, Artificial Sequence
  Description of Artificial Sequence: Synthetic oligonucleotide
  modified_base (1)..(1): 2' O-methyl modified
  misc_feature (1)..(2): Phosphorothioate linkage
  modified_base (2)..(2): 2' fluoro-modified
  misc_feature (2)..(3): Phosphorothioate linkage
  modified_base (3)..(3): 2' O-methyl modified
  modified_base (4)..(4): 2' fluoro-modified
  modified_base (5)..(5): 2' O-methyl modified
  modified_base (6)..(6): 2' fluoro-modified
  modified_base (7)..(7): 2' O-methyl modified
  modified_base (8)..(8): 2' fluoro-modified
  modified_base (9)..(9): 2' O-methyl modified
  modified_base (10)..(10): 2' fluoro-modified
  modified_base (11)..(11): 2' O-methyl modified
  modified_base (12)..(12): 2' fluoro-modified
  modified_base (13)..(13): 2' O-methyl modified
  modified_base (14)..(14): 2' fluoro-modified
  modified_base (15)..(15): 2' O-methyl modified
  modified_base (16)..(16): 2' fluoro-modified
  modified_base (17)..(17): 2' O-methyl modified
  modified_base (18)..(18): 2' fluoro-modified
  modified_base (19)..(19): 2' O-methyl modified
  misc_feature (19)..(20): Phosphorothioate linkage
  modified_base (20)..(20): 2' O-methyl modified
  misc_feature (20)..(21): Phosphorothioate linkage
  modified_base (21)..(21): 2' O-methyl modified
uuuuauuccaagaacucuguu

SEQ ID NO: 14316 - RNA, 21 nt, Artificial Sequence
  Description of Artificial Sequence: Synthetic oligonucleotide
  modified_base (1)..(1): 2' O-methyl modified
  misc_feature (1)..(2): Phosphorothioate linkage
  modified_base (2)..(2): 2' fluoro-modified
  misc_feature (2)..(3): Phosphorothioate linkage
  modified_base (3)..(3): 2' O-methyl modified
  modified_base (4)..(4): 2' O-methyl modified
  modified_base (5)..(5): 2' O-methyl modified
  modified_base (6)..(6): 2' fluoro-modified
  modified_base (7)..(7): 2' O-methyl modified
  modified_base (8)..(8): 2' fluoro-modified
  modified_base (9)..(9): 2' O-methyl modified
  modified_base (10)..(10): 2' fluoro-modified
  modified_base (11)..(11): 2' O-methyl modified
  modified_base (12)..(12): 2' fluoro-modified
  modified_base (13)..(13): 2' O-methyl modified
  modified_base (14)..(14): 2' fluoro-modified
  modified_base (15)..(15): 2' O-methyl modified
  modified_base (16)..(16): 2' fluoro-modified
  modified_base (17)..(17): 2' O-methyl modified
  modified_base (18)..(18): 2' fluoro-modified
  modified_base (19)..(19): 2' O-methyl modified
  misc_feature (19)..(20): Phosphorothioate linkage
  modified_base (20)..(20): 2' O-methyl modified
  misc_feature (20)..(21): Phosphorothioate linkage
  modified_base (21)..(21): 2' O-methyl modified
uuuuauuccaagaacucuguu

SEQ ID NO: 14317 - RNA, 21 nt, Artificial Sequence
  Description of Artificial Sequence: Synthetic oligonucleotide
  modified_base (1)..(1): 2' O-methyl modified
  misc_feature (1)..(2): Phosphorothioate linkage
  modified_base (2)..(2): 2' fluoro-modified
  misc_feature (2)..(3): Phosphorothioate linkage
  modified_base (3)..(3): 2' O-methyl modified
  misc_feature (3)..(4): Phosphorothioate linkage
  modified_base (4)..(4): 2' fluoro-modified
  modified_base (5)..(5): 2' O-methyl modified
  modified_base (6)..(6): 2' fluoro-modified
  modified_base (7)..(7): 2' O-methyl modified
  modified_base (8)..(8): 2' fluoro-modified
  modified_base (9)..(9): 2' O-methyl modified
  modified_base (10)..(10): 2' fluoro-modified
  modified_base (11)..(11): 2' O-methyl modified
  modified_base (12)..(12): 2' fluoro-modified
  modified_base (13)..(13): 2' O-methyl modified
  modified_base (14)..(14): 2' fluoro-modified
  modified_base (15)..(15): 2' O-methyl modified
  modified_base (16)..(16): 2' fluoro-modified
  modified_base (17)..(17): 2' O-methyl modified
  modified_base (18)..(18): 2' fluoro-modified
  modified_base (19)..(19): 2' O-methyl modified
  misc_feature (19)..(20): Phosphorothioate linkage
  modified_base (20)..(20): 2' O-methyl modified
  misc_feature (20)..(21): Phosphorothioate linkage
  modified_base (21)..(21): 2' O-methyl modified
uuuuauuccaagaacucuguu

SEQ ID NO: 14318 - RNA, 21 nt, Artificial Sequence
  Description of Artificial Sequence: Synthetic oligonucleotide
  modified_base (1)..(1): 2' O-methyl modified
  misc_feature (1)..(2): Phosphorothioate linkage
  modified_base (2)..(2): 2' fluoro-modified
  misc_feature (2)..(3): Phosphorothioate linkage
  modified_base (3)..(3): 2' O-methyl modified
  modified_base (4)..(4): 2' fluoro-modified
  modified_base (5)..(5): 2' O-methyl modified
  modified_base (6)..(6): 2' fluoro-modified
  modified_base (7)..(7): 2' O-methyl modified
  modified_base (8)..(8): 2' O-methyl modified
  modified_base (9)..(9): 2' O-methyl modified
  modified_base (10)..(10): 2' fluoro-modified
  modified_base (11)..(11): 2' O-methyl modified
  modified_base (12)..(12): 2' fluoro-modified
  modified_base (13)..(13): 2' O-methyl modified
  modified_base (14)..(14): 2' fluoro-modified
  modified_base (15)..(15): 2' O-methyl modified
  modified_base (16)..(16): 2' fluoro-modified
  modified_base (17)..(17): 2' O-methyl modified
  modified_base (18)..(18): 2' fluoro-modified
  modified_base (19)..(19): 2' O-methyl modified
  misc_feature (19)..(20): Phosphorothioate linkage
  modified_base (20)..(20): 2' O-methyl modified
  misc_feature (20)..(21): Phosphorothioate linkage
  modified_base (21)..(21): 2' O-methyl modified
uuuuauuccaagaacucuguu

SEQ ID NO: 14319 - RNA, 21 nt, Artificial Sequence
  Description of Artificial Sequence: Synthetic oligonucleotide
  modified_base (1)..(1): 2' O-methyl modified
  misc_feature (1)..(2): Phosphorothioate linkage
  modified_base (2)..(2): 2' fluoro-modified
  misc_feature (2)..(3): Phosphorothioate linkage
  modified_base (3)..(3): 2' O-methyl modified
  modified_base (4)..(4): 2' fluoro-modified
  modified_base (5)..(5): 2' O-methyl modified
  modified_base (6)..(6): 2' fluoro-modified
  modified_base (7)..(7): 2' O-methyl modified
  modified_base (8)..(8): 2' O-methyl modified
  modified_base (9)..(9): 2' O-methyl modified
  modified_base (10)..(10): 2' O-methyl modified
  modified_base (11)..(11): 2' O-methyl modified
  modified_base (12)..(12): 2' fluoro-modified
  modified_base (13)..(13): 2' O-methyl modified
  modified_base (14)..(14): 2' fluoro-modified
  modified_base (15)..(15): 2' O-methyl modified
  modified_base (16)..(16): 2' fluoro-modified
  modified_base (17)..(17): 2' O-methyl modified
  modified_base (18)..(18): 2' fluoro-modified
  modified_base (19)..(19): 2' O-methyl modified
  misc_feature (19)..(20): Phosphorothioate linkage
  modified_base (20)..(20): 2' O-methyl modified
  misc_feature (20)..(21): Phosphorothioate linkage
  modified_base (21)..(21): 2' O-methyl modified
uuuuauuccaagaacucuguu

SEQ ID NO: 14320 - RNA, 21 nt, Artificial Sequence
  Description of Artificial Sequence: Synthetic oligonucleotide
  modified_base (1)..(1): 2' O-methyl modified
  misc_feature (1)..(2): Phosphorothioate linkage
  modified_base (2)..(2): 2' fluoro-modified
  misc_feature (2)..(3): Phosphorothioate linkage
  modified_base (3)..(3): 2' O-methyl modified
  modified_base (4)..(4): 2' fluoro-modified
  modified_base (5)..(5): 2' O-methyl modified
  modified_base (6)..(6): 2' fluoro-modified
  modified_base (7)..(7): 2' O-methyl modified
  modified_base (8)..(8): 2' fluoro-modified
  modified_base (9)..(9): 2' O-methyl modified
  modified_base (10)..(10): 2' fluoro-modified
  modified_base (11)..(11): 2' O-methyl modified
  modified_base (12)..(12): 2' fluoro-modified
  modified_base (13)..(13): 2' O-methyl modified
  modified_base (14)..(14): 2' fluoro-modified
  modified_base (15)..(15): 2' O-methyl modified
  modified_base (16)..(16): 2' fluoro-modified
  modified_base (17)..(17): 2' O-methyl modified
  modified_base (18)..(18): 2' fluoro-modified
  modified_base (19)..(19): 2' O-methyl modified
  misc_feature (19)..(20): Phosphorothioate linkage
  modified_base (20)..(20): 2' O-methyl modified
  misc_feature (20)..(21): Phosphorothioate linkage
  modified_base (21)..(21): 2' O-methyl modified
uuuuauuccaagaacucuguu

SEQ ID NO: 14321 - RNA, 21 nt, Artificial Sequence
  Description of Artificial Sequence: Synthetic oligonucleotide
  modified_base (1)..(1): 2' O-methyl modified
  misc_feature (1)..(2): Phosphorothioate linkage
  modified_base (2)..(2): 2' fluoro-modified
  misc_feature (2)..(3): Phosphorothioate linkage
  modified_base (3)..(3): 2' O-methyl modified
  modified_base (4)..(4): 2' fluoro-modified
  modified_base (5)..(5): 2' O-methyl modified
  modified_base (6)..(6): 2' fluoro-modified
  modified_base (7)..(7): 2' O-methyl modified
  modified_base (8)..(8): 2' fluoro-modified
  modified_base (9)..(9): 2' O-methyl modified
  modified_base (10)..(10): 2' fluoro-modified
  modified_base (11)..(11): 2' O-methyl modified
  modified_base (12)..(12): 2' fluoro-modified
  modified_base (13)..(13): 2' O-methyl modified
  modified_base (14)..(14): 2' fluoro-modified
  modified_base (15)..(15): 2' O-methyl modified
  modified_base (16)..(16): 2' fluoro-modified
  modified_base (17)..(17): 2' O-methyl modified
  modified_base (18)..(18): 2' fluoro-modified
  modified_base (19)..(19): 2' O-methyl modified
  misc_feature (19)..(20): Phosphorothioate linkage
  modified_base (20)..(20): 2' O-methyl modified
  misc_feature (20)..(21): Phosphorothioate linkage
  modified_base (21)..(21): 2' O-methyl modified
ucucuagagucugagcauauu

SEQ ID NO: 14322 - RNA, 21 nt, Artificial Sequence
  Description of Artificial Sequence: Synthetic oligonucleotide
  5' Phosphorothioate linkage
  modified_base (1)..(1): 2' O-methyl modified a, c, u, g, or other
  modified_base (2)..(2): 2' O-methyl modified a, c, u, g, or other
  modified_base (3)..(3): 2' O-methyl modified a, c, u, g, or other
  modified_base (4)..(4): 2' O-methyl modified a, c, u, g, or other
  modified_base (5)..(5): 2' fluoro-modified a, c, u, g, or other
  modified_base (6)..(6): 2' fluoro-modified a, c, u, g, or other
  modified_base (7)..(7): 2' O-methyl modified a, c, u, g, or other
  modified_base (8)..(8): 2' fluoro-modified a, c, u, g, or other
  modified_base (9)..(9): 2' fluoro-modified a, c, u, g, or other
  modified_base (10)..(10): 2' O-methyl modified a, c, u, g, or other
  modified_base (11)..(11): 2' O-methyl modified a, c, u, g, or other
  modified_base (12)..(12): 2' O-methyl modified a, c, u, g, or other
  modified_base (13)..(13): 2' O-methyl modified a, c, u, g, or other
  modified_base (14)..(14): 2' O-methyl modified a, c, u, g, or other
  modified_base (15)..(15): 2' O-methyl modified a, c, u, g, or other
  modified_base (16)..(16): 2' O-methyl modified a, c, u, g, or other
  modified_base (17)..(17): 2' O-methyl modified a, c, u, g, or other
  modified_base (18)..(18): 2' O-methyl modified a, c, u, g, or other
  modified_base (19)..(19): 2' O-methyl modified a, c, u, g, or other
  misc_feature (19)..(20): Phosphorothioate linkage
  modified_base (20)..(20): 2' O-methyl modified a, c, u, g, or other
  misc_feature (20)..(21): Phosphorothioate linkage
  modified_base (21)..(21): 2' O-methyl modified a, c, u, g, or other
nnnnnnnnnnnnnnnnnnnnn

SEQ ID NO: 14323 - RNA, 21 nt, Artificial Sequence
  Description of Artificial Sequence: Synthetic oligonucleotide
  5' Phosphorothioate linkage
  modified_base (1)..(1): 2' O-methyl modified a, c, u, g, or other
  modified_base (2)..(2): 2' O-methyl modified a, c, u, g, or other
  modified_base (3)..(3): 2' O-methyl modified a, c, u, g, or other
  modified_base (4)..(4): 2' O-methyl modified a, c, u, g, or other
  modified_base (5)..(5): 2' fluoro-modified a, c, u, g, or other
  modified_base (6)..(6): 2' fluoro-modified a, c, u, g, or other
  modified_base (7)..(7): 2' O-methyl modified a, c, u, g, or other
  modified_base (8)..(8): 2' fluoro-modified a, c, u, g, or other
  modified_base (9)..(9): 2' fluoro-modified a, c, u, g, or other
  modified_base (10)..(10): 2' O-methyl modified a, c, u, g, or other
  modified_base (11)..(11): 2' fluoro-modified a, c, u, g, or other
  modified_base (12)..(12): 2' O-methyl modified a, c, u, g, or other
  modified_base (13)..(13): 2' O-methyl modified a, c, u, g, or other
  modified_base (14)..(14): 2' O-methyl modified a, c, u, g, or other
  modified_base (15)..(15): 2' O-methyl modified a, c, u, g, or other
  modified_base (16)..(16): 2' O-methyl modified a, c, u, g, or other
  modified_base (17)..(17): 2' O-methyl modified a, c, u, g, or other
  modified_base (18)..(18): 2' O-methyl modified a, c, u, g, or other
  modified_base (19)..(19): 2' O-methyl modified a, c, u, g, or other
  misc_feature (19)..(20): Phosphorothioate linkage
  modified_base (20)..(20): 2' O-methyl modified a, c, u, g, or other
  misc_feature (20)..(21): Phosphorothioate linkage
  modified_base (21)..(21): 2' O-methyl modified a, c, u, g, or other
nnnnnnnnnnnnnnnnnnnnn

SEQ ID NO: 14324 - RNA, 21 nt, Artificial Sequence
  Description of Artificial Sequence: Synthetic oligonucleotide
  5' Phosphorothioate linkage
  modified_base (1)..(1): 2' O-methyl modified a, c, u, g, or other
  modified_base (2)..(2): 2' O-methyl modified a, c, u, g, or other
  modified_base (3)..(3): 2' O-methyl modified a, c, u, g, or other
  modified_base (4)..(4): 2' O-methyl modified a, c, u, g, or other
  modified_base (5)..(5): 2' O-methyl modified a, c, u, g, or other
  modified_base (6)..(6): 2' O-methyl modified a, c, u, g, or other
  modified_base (7)..(7): 2' fluoro-modified a, c, u, g, or other
  modified_base (8)..(8): 2' O-methyl modified a, c, u, g, or other
  modified_base (9)..(9): 2' fluoro-modified a, c, u, g, or other
  modified_base (10)..(10): 2' O-methyl modified a, c, u, g, or other
  modified_base (11)..(11): 2' O-methyl modified a, c, u, g, or other
  modified_base (12)..(12): 2' O-methyl modified a, c, u, g, or other
  modified_base (13)..(13): 2' O-methyl modified a, c, u, g, or other
  modified_base (14)..(14): 2' O-methyl modified a, c, u, g, or other
  modified_base (15)..(15): 2' O-methyl modified a, c, u, g, or other
  modified_base (16)..(16): 2' O-methyl modified a, c, u, g, or other
  modified_base (17)..(17): 2' O-methyl modified a, c, u, g, or other
  modified_base (18)..(18): 2' O-methyl modified a, c, u, g, or other
  modified_base (19)..(19): 2' O-methyl modified a, c, u, g, or other
  misc_feature (19)..(20): Phosphorothioate linkage
  modified_base (20)..(20): 2' O-methyl modified a, c, u, g, or other
  misc_feature (20)..(21): Phosphorothioate linkage
  modified_base (21)..(21): 2' O-methyl modified a, c, u, g, or other
nnnnnnnnnnnnnnnnnnnnn

SEQ ID NO: 14325 - RNA, 21 nt, Artificial Sequence
  Description of Artificial Sequence: Synthetic oligonucleotide
  5' Phosphorothioate linkage
  modified_base (1)..(1): 2' O-methyl modified a, c, u, g, or other
  modified_base (2)..(2): 2' O-methyl modified a, c, u, g, or other
  modified_base (3)..(3): 2' O-methyl modified a, c, u, g, or other
  modified_base (4)..(4): 2' O-methyl modified a, c, u, g, or other
  modified_base (5)..(5): 2' O-methyl modified a, c, u, g, or other
  modified_base (6)..(6): 2' fluoro-modified a, c, u, g, or other
  modified_base (7)..(7): 2' fluoro-modified a, c, u, g, or other
  modified_base (8)..(8): 2' O-methyl modified a, c, u, g, or other
  modified_base (9)..(9): 2' fluoro-modified a, c, u, g, or other
  modified_base (10)..(10): 2' O-methyl modified a, c, u, g, or other
  modified_base (11)..(11): 2' fluoro-modified a, c, u, g, or other
  modified_base (12)..(12): 2' O-methyl modified a, c, u, g, or other
  modified_base (13)..(13): 2' O-methyl modified a, c, u, g, or other
  modified_base (14)..(14): 2' O-methyl modified a, c, u, g, or other
  modified_base (15)..(15): 2' O-methyl modified a, c, u, g, or other
  modified_base (16)..(16): 2' O-methyl modified a, c, u, g, or other
  modified_base (17)..(17): 2' O-methyl modified a, c, u, g, or other
  modified_base (18)..(18): 2' O-methyl modified a, c, u, g, or other
  modified_base (19)..(19): 2' O-methyl modified a, c, u, g, or other
  misc_feature (19)..(20): Phosphorothioate linkage
  modified_base (20)..(20): 2' O-methyl modified a, c, u, g, or other
  misc_feature (20)..(21): Phosphorothioate linkage
  modified_base (21)..(21): 2' O-methyl modified a, c, u, g, or other
nnnnnnnnnnnnnnnnnnnnn

SEQ ID NO: 14326 - RNA, 21 nt, Artificial Sequence
  Description of Artificial Sequence: Synthetic oligonucleotide
  5' Phosphorothioate linkage
  modified_base (1)..(1): 2' O-methyl modified a, c, u, g, or other
  modified_base (2)..(2): 2' O-methyl modified a, c, u, g, or other
  modified_base (3)..(3): 2' O-methyl modified a, c, u, g, or other
  modified_base (4)..(4): 2' O-methyl modified a, c, u, g, or other
  modified_base (5)..(5): 2' O-methyl modified a, c, u, g, or other
  modified_base (6)..(6): 2' fluoro-modified a, c, u, g, or other
  modified_base (7)..(7): 2' fluoro-modified a, c, u, g, or other
  modified_base (8)..(8): 2' fluoro-modified a, c, u, g, or other
  modified_base (9)..(9): 2' fluoro-modified a, c, u, g, or other
  modified_base (10)..(10): 2' O-methyl modified a, c, u, g, or other
  modified_base (11)..(11): 2' O-methyl modified a, c, u, g, or other
  modified_base (12)..(12): 2' O-methyl modified a, c, u, g, or other
  modified_base (13)..(13): 2' O-methyl modified a, c, u, g, or other
  modified_base (14)..(14): 2' O-methyl modified a, c, u, g, or other
  modified_base (15)..(15): 2' O-methyl modified a, c, u, g, or other
  modified_base (16)..(16): 2' O-methyl modified a, c, u, g, or other
  modified_base (17)..(17): 2' O-methyl modified a, c, u, g, or other
  modified_base (18)..(18): 2' O-methyl modified a, c, u, g, or other
  modified_base (19)..(19): 2' O-methyl modified a, c, u, g, or other
  misc_feature (19)..(20): Phosphorothioate linkage
  modified_base (20)..(20): 2' O-methyl modified a, c, u, g, or other
  misc_feature (20)..(21): Phosphorothioate linkage
  modified_base (21)..(21): 2' O-methyl modified a, c, u, g, or other
nnnnnnnnnnnnnnnnnnnnn

SEQ ID NO: 14327 - RNA, 21 nt, Artificial Sequence
  Description of Artificial Sequence: Synthetic oligonucleotide
  5' Phosphorothioate linkage
  modified_base (1)..(1): 2' O-methyl modified a, c, u, g, or other
  modified_base (2)..(2): 2' O-methyl modified a, c, u, g, or other
  modified_base (3)..(3): 2' O-methyl modified a, c, u, g, or other
  modified_base (4)..(4): 2' O-methyl modified a, c, u, g, or other
  modified_base (5)..(5): 2' O-methyl modified a, c, u, g, or other
  modified_base (6)..(6): 2' fluoro-modified a, c, u, g, or other
  modified_base (7)..(7): 2' fluoro-modified a, c, u, g, or other
  modified_base (8)..(8): 2' fluoro-modified a, c, u, g, or other
  modified_base (9)..(9): 2' fluoro-modified a, c, u, g, or other
  modified_base (10)..(10): 2' O-methyl modified a, c, u, g, or other
  modified_base (11)..(11): 2' deoxy-modified a, c, u, g, or other
  modified_base (12)..(12): 2' O-methyl modified a, c, u, g, or other
  modified_base (13)..(13): 2' O-methyl modified a, c, u, g, or other
  modified_base (14)..(14): 2' O-methyl modified a, c, u, g, or other
  modified_base (15)..(15): 2' O-methyl modified a, c, u, g, or other
  modified_base (16)..(16): 2' O-methyl modified a, c, u, g, or other
  modified_base (17)..(17): 2' O-methyl modified a, c, u, g, or other
  modified_base (18)..(18): 2' O-methyl modified a, c, u, g, or other
  modified_base (19)..(19): 2' O-methyl modified a, c, u, g, or other
  misc_feature (19)..(20): Phosphorothioate linkage
  modified_base (20)..(20): 2' O-methyl modified a, c, u, g, or other
  misc_feature (20)..(21): Phosphorothioate linkage
  modified_base (21)..(21): 2' O-methyl modified a, c, u, g, or other
nnnnnnnnnnnnnnnnnnnnn

SEQ ID NO: 14328 - RNA, 21 nt, Artificial Sequence
  Description of Artificial Sequence: Synthetic oligonucleotide
  5' Phosphorothioate linkage
  modified_base (1)..(1): 2' O-methyl modified a, c, u, g, or other
  modified_base (2)..(2): 2' O-methyl modified a, c, u, g, or other
  modified_base (3)..(3): 2' fluoro-modified a, c, u, g, or other
  modified_base (4)..(4): 2' O-methyl modified a, c, u, g, or other
  modified_base (5)..(5): 2' fluoro-modified a, c, u, g, or other
  modified_base (6)..(6): 2' O-methyl modified a, c, u, g, or other
  modified_base (7)..(7): 2' fluoro-modified a, c, u, g, or other
  modified_base (8)..(8): 2' O-methyl modified a, c, u, g, or other
  modified_base (9)..(9): 2' deoxy-modified a, c, u, g, or other
  modified_base (10)..(10): 2' O-methyl modified a, c, u, g, or other
  modified_base (11)..(11): 2' O-methyl modified a, c, u, g, or other
  modified_base (12)..(12): 2' O-methyl modified a, c, u, g, or other
  modified_base (13)..(13): 2' O-methyl modified a, c, u, g, or other
  modified_base (14)..(14): 2' O-methyl modified a, c, u, g, or other
  modified_base (15)..(15): 2' O-methyl modified a, c, u, g, or other
  modified_base (16)..(16): 2' O-methyl modified a, c, u, g, or other
  modified_base (17)..(17): 2' O-methyl modified a, c, u, g, or other
  modified_base (18)..(18): 2' O-methyl modified a, c, u, g, or other
  modified_base (19)..(19): 2' O-methyl modified a, c, u, g, or other
  misc_feature (19)..(20): Phosphorothioate linkage
  modified_base (20)..(20): 2' O-methyl modified a, c, u, g, or other
  misc_feature (20)..(21): Phosphorothioate linkage
  modified_base (21)..(21): 2' O-methyl modified a, c, u, g, or other
nnnnnnnnnnnnnnnnnnnnn

SEQ ID NO: 14329 - RNA, 21 nt, Artificial Sequence
  Description of Artificial Sequence: Synthetic oligonucleotide
  modified_base (1)..(1): 2' O-methyl modified a, c, u, g, or other
  misc_feature (1)..(2): Phosphorothioate linkage
  modified_base (2)..(2): 2' fluoro-modified a, c, u, g, or other
  misc_feature (2)..(3): Phosphorothioate linkage
  modified_base (3)..(3): 2' O-methyl modified a, c, u, g, or other
  modified_base (4)..(4): 2' O-methyl modified a, c, u, g, or other
  modified_base (5)..(5): 2' O-methyl modified a, c, u, g, or other
  modified_base (6)..(6): 2' fluoro-modified a, c, u, g, or other
  modified_base (7)..(7): 2' O-methyl modified a, c, u, g, or other
  modified_base (8)..(8): 2' fluoro-modified a, c, u, g, or other
  modified_base (9)..(9): 2' O-methyl modified a, c, u, g, or other
  modified_base (10)..(10): 2' fluoro-modified a, c, u, g, or other
  modified_base (11)..(11): 2' O-methyl modified a, c, u, g, or other
  modified_base (12)..(12): 2' fluoro-modified a, c, u, g, or other
  modified_base (13)..(13): 2' O-methyl modified a, c, u, g, or other
  modified_base (14)..(14): 2' fluoro-modified a, c, u, g, or other
  modified_base (15)..(15): 2' O-methyl modified a, c, u, g, or other
  modified_base (16)..(16): 2' fluoro-modified a, c, u, g, or other
  modified_base (17)..(17): 2' O-methyl modified a, c, u, g, or other
  modified_base (18)..(18): 2' fluoro-modified a, c, u, g, or other
  modified_base (19)..(19): 2' O-methyl modified a, c, u, g, or other
  misc_feature (19)..(20): Phosphorothioate linkage
  modified_base (20)..(20): 2' O-methyl modified a, c, u, g, or other
  misc_feature (20)..(21): Phosphorothioate linkage
  modified_base (21)..(21): 2' O-methyl modified a, c, u, g, or other
nnnnnnnnnnnnnnnnnnnnn

SEQ ID NO: 14330 - RNA, 21 nt, Artificial Sequence
  Description of Artificial Sequence: Synthetic oligonucleotide
  modified_base (1)..(1): 2' O-methyl modified a, c, u, g, or other
  misc_feature (1)..(2): Phosphorothioate linkage
  modified_base (2)..(2): 2' fluoro-modified a, c, u, g, or other
  misc_feature (2)..(3): Phosphorothioate linkage
  modified_base (3)..(3): 2' O-methyl modified a, c, u, g, or other
  misc_feature (3)..(4): Phosphorothioate linkage
  modified_base (4)..(4): 2' fluoro-modified a, c, u, g, or other
  modified_base (5)..(5): 2' O-methyl modified a, c, u, g, or other
  modified_base (6)..(6): 2' fluoro-modified a, c, u, g, or other
  modified_base (7)..(7): 2' O-methyl modified a, c, u, g, or other
  modified_base (8)..(8): 2' fluoro-modified a, c, u, g, or other
  modified_base (9)..(9): 2' O-methyl modified a, c, u, g, or other
  modified_base (10)..(10): 2' fluoro-modified a, c, u, g, or other
  modified_base (11)..(11): 2' O-methyl modified a, c, u, g, or other
  modified_base (12)..(12): 2' fluoro-modified a, c, u, g, or other
  modified_base (13)..(13): 2' O-methyl modified a, c, u, g, or other
  modified_base (14)..(14): 2' fluoro-modified a, c, u, g, or other
  modified_base (15)..(15): 2' O-methyl modified a, c, u, g, or other
  modified_base (16)..(16): 2' fluoro-modified a, c, u, g, or other
  modified_base (17)..(17): 2' O-methyl modified a, c, u, g, or other
  modified_base (18)..(18): 2' fluoro-modified a, c, u, g, or other
  modified_base (19)..(19): 2' O-methyl modified a, c, u, g, or other
  misc_feature (19)..(20): Phosphorothioate linkage
  modified_base (20)..(20): 2' O-methyl modified a, c, u, g, or other
  misc_feature (20)..(21): Phosphorothioate linkage
  modified_base (21)..(21): 2' O-methyl modified a, c, u, g, or other
nnnnnnnnnnnnnnnnnnnnn

SEQ ID NO: 14331 - RNA, 21 nt, Artificial Sequence
  Description of Artificial Sequence: Synthetic oligonucleotide
  modified_base (1)..(1): 2' O-methyl modified a, c, u, g, or other
  misc_feature (1)..(2): Phosphorothioate linkage
  modified_base (2)..(2): 2' fluoro-modified a, c, u, g, or other
  misc_feature (2)..(3): Phosphorothioate linkage
  modified_base (3)..(3): 2' O-methyl modified a, c, u, g, or other
  modified_base (4)..(4): 2' fluoro-modified a, c, u, g, or other
  modified_base (5)..(5): 2' O-methyl modified a, c, u, g, or other
  modified_base (6)..(6): 2' fluoro-modified a, c, u, g, or other
  modified_base (7)..(7): 2' O-methyl modified a, c, u, g, or other
  modified_base (8)..(8): 2' O-methyl modified a, c, u, g, or other
  modified_base (9)..(9): 2' O-methyl modified a, c, u, g, or other
  modified_base (10)..(10): 2' fluoro-modified a, c, u, g, or other
  modified_base (11)..(11): 2' O-methyl modified a, c, u, g, or other
  modified_base (12)..(12): 2' fluoro-modified a, c, u, g, or other
  modified_base (13)..(13): 2' O-methyl modified a, c, u, g, or other
  modified_base (14)..(14): 2' fluoro-modified a, c, u, g, or other
  modified_base (15)..(15): 2' O-methyl modified a, c, u, g, or other
  modified_base (16)..(16): 2' fluoro-modified a, c, u, g, or other
  modified_base (17)..(17): 2' O-methyl modified a, c, u, g, or other
  modified_base (18)..(18): 2' fluoro-modified a, c, u, g, or other
  modified_base (19)..(19): 2' O-methyl modified a, c, u, g, or other
  misc_feature (19)..(20): Phosphorothioate linkage
  modified_base (20)..(20): 2' O-methyl modified a, c, u, g, or other
  misc_feature (20)..(21): Phosphorothioate linkage
  modified_base (21)..(21): 2' O-methyl modified a, c, u, g, or other
nnnnnnnnnnnnnnnnnnnnn

SEQ ID NO: 14332 - RNA, 21 nt, Artificial Sequence
  Description of Artificial Sequence: Synthetic oligonucleotide
  modified_base (1)..(1): 2' O-methyl modified a, c, u, g, or other
  misc_feature (1)..(2): Phosphorothioate linkage
  modified_base (2)..(2): 2' fluoro-modified a, c, u, g, or other
  misc_feature (2)..(3): Phosphorothioate linkage
  modified_base (3)..(3): 2' O-methyl modified a, c, u, g, or other
  modified_base (4)..(4): 2' fluoro-modified a, c, u, g, or other
  modified_base (5)..(5): 2' O-methyl modified a, c, u, g, or other
  modified_base (6)..(6): 2' fluoro-modified a, c, u, g, or other
  modified_base (7)..(7): 2' O-methyl modified a, c, u, g, or other
  modified_base (8)..(8): 2' O-methyl modified a, c, u, g, or other
  modified_base (9)..(9): 2' O-methyl modified a, c, u, g, or other
  modified_base (10)..(10): 2' O-methyl modified a, c, u, g, or other
  modified_base (11)..(11): 2' O-methyl modified a, c, u, g, or other
  modified_base (12)..(12): 2' fluoro-modified a, c, u, g, or other
  modified_base (13)..(13): 2' O-methyl modified a, c, u, g, or other
  modified_base (14)..(14): 2' fluoro-modified a, c, u, g, or other
  modified_base (15)..(15): 2' O-methyl modified a, c, u, g, or other
  modified_base (16)..(16): 2' fluoro-modified a, c, u, g, or other
  modified_base (17)..(17): 2' O-methyl modified a, c, u, g, or other
  modified_base (18)..(18): 2' fluoro-modified a, c, u, g, or other
  modified_base (19)..(19): 2' O-methyl modified a, c, u, g, or other
  misc_feature (19)..(20): Phosphorothioate linkage
  modified_base (20)..(20): 2' O-methyl modified a, c, u, g, or other
  misc_feature (20)..(21): Phosphorothioate linkage
  modified_base (21)..(21): 2' O-methyl modified a, c, u, g, or other
nnnnnnnnnnnnnnnnnnnnn
